(19) United States
(12) Patent Application Publication
(10) Pub. No.: US 2023/0054720 A1
(43) Pub. Date: Feb. 23, 2023

(54) Antisense Oligonucleotides Targeting ATXN3

(71) Applicant: Hoffmann-La Roche Inc., Little Falls, NJ (US)

(72) Inventors: Heidi Rye Hudlebusch, Bronshoj (DK); Lykke Pedersen, Kobenhavn NV (DK); Erik Funder, Hillerod (DK); Lukasz Kielpinski, Horsholm (DK); Christoffer Sondergaard, Alleroed (DK); Alexander Herbert Stephan, Basel-City (CH); Mads Manso, Copenagen V (DK)

(21) Appl. No.: 17/540,495

(22) Filed: Dec. 2, 2021

(30) Foreign Application Priority Data
Dec. 3, 2020 (EP) EP20211612.5

(51) Int. Cl. A61K 31/7088; C12N 15/113; A61P 25/28

(52) U.S. Cl. CPC A61K 31/7088; C12N 15/113; A61P 25/28; C12N 2320/32; C12N 2310/341; C12N 2310/11; C12N 2310/3341; C12N 2310/315; C12N 2310/3231

(57) ABSTRACT

The present invention relates to antisense LNA oligonucleotides (oligomers) complementary to ATXN3 pre-mRNA sequences, which are capable of inhibiting the expression of ATXN3 protein. Inhibition of ATXN3 expression is beneficial for the treatment of spinocerebellar ataxia

### CROSS REFERENCE TO RELATED APPLICATIONS

[0001] This application claims benefit of and priority to the European Patent Application EP 20211612.5 filed on Dec. 3, 2020, all of which are incorporated by reference in their entireties where permissible.

### TECHNICAL FIELD OF THE INVENTION

[0002] The present invention relates to antisense LNA oligonucleotides (oligomers) complementary to ATXN3 pre-mRNA sequences, which are capable of inhibiting the expression of ATXN3. Inhibition of ATXN3 expression is beneficial for the treatment of spinocerebellar ataxia, such as spinocerebellar ataxia 3 (Machado-Joseph disease (MJD)).

### REFERENCE TO SEQUENCE LISTING

[0003] The instant application contains a Sequence Listing which has been submitted electronically in ASCII format and is hereby incorporated by reference in its entirety. Said ASCII copy, created on Dec. 3, 2020, is named 067211_013US1_SL.txt and is 613,139 bytes in size.

### BACKGROUND OF THE INVENTION

[0004] Spinocerebellar ataxia type 3 (SCA3), also known as Machado-Joseph disease (MJD), is one of nine polyglutamine expansion diseases and the most common dominantly inherited ataxia in the world. While certain symptoms in SCA3 may respond to symptomatic therapy, there is still no effective treatment for this relentlessly progressive and fatal neurodegenerative disease. The disease is caused by a CAG repeat expansion in the ATXN3 gene that encodes an abnormally long polyglutamine tract in the disease protein, ATXN3 (Ataxin 3). The toxic ataxin-3 protein is associated with aggregates which are frequently observed in the brain tissue of SCA3 patients.

[0005] Moore et al. reported that antisense oligonucleotides (ASOs) targeting ATXN3 were capable of reducing levels of the pathogenic ATXN3 protein both in human disease fibroblasts and in a mouse model expressing the full-length human mutant ATXN3 gene (Moore et al., Mol Ther Nucleic Acids. 2017; 7:200-210). Therefore, ASO-mediated targeting of ATXN3 was suggested as therapeutic approach for SCA3.

[0006] Swayze et al. (Nucleic Acids Res. 2007; 35(2):687-700. Epub 2006 Dec. 19), reports that antisense oligonucleotides containing locked nucleic acid have the potential to improve potency but cause significant toxicity in animals (hepatotoxicity).

[0007] Toonen et al. used antisense oligonucleotides to mask predicted exonic splicing signals of ATXN3, resulting in exon 10 skipping from ATXN3 pre-mRNA. The skipping of exon 10 led to formation of a truncated ataxin-3 protein lacking the toxic polyglutamine expansion, but retaining its ubiquitin binding and cleavage function (Toonen et al., Molecular Therapy—Nucleic Acids, 2017, Volume 8: 232-242).

[0008] WO2013/138353, WO2015/017675, WO2018/089805, WO2019/217708 and WO2020/172559 disclose antisense oligonucleotides targeting human ATXN3 mRNA for use in the treatment of SCA3.

### SUMMARY OF THE INVENTION

[0009] The present invention identifies regions of the ATXN3 transcript (ATXN3) for antisense inhibition in vitro or in vivo, and provides for antisense oligonucleotides, including LNA gapmer oligonucleotides, which target these regions of the ATXN3 pre-mRNA or mature mRNA. Particularly, the present invention identifies antisense oligonucleotides which target human ATXN3 pre-mRNA or mature mRNA more effectively than they target the human Potassium Voltage-Gated Channel Subfamily B Member 2 (KCNB2) pre-mRNA or mature mRNA. The present invention identifies oligonucleotides which inhibit human ATXN3 which are useful in the treatment of spinocerebellar ataxia.

[0010] The invention provides for an antisense oligonucleotide, 10-30 nucleotides in length, targeting a mammalian ATXN3 (Ataxin 3) target nucleic acid, wherein the antisense oligonucleotide is capable of inhibiting the expression of mammalian ATXN3 in a cell which is expressing mammalian ATXN3. The mammalian ATXN3 target nucleic acid may be, e.g., a human, monkey or mouse ATXN3 target nucleic acid.

[0011] The invention also provides for an LNA gapmer antisense oligonucleotide, 10-30 nucleotides in length, wherein said antisense oligonucleotide comprises a contiguous nucleotide sequence 10-30 nucleotides in length, wherein the contiguous nucleotide sequence is at least 90% complementary, such as fully complementary, to SEQ ID NO:1, wherein the antisense oligonucleotide is capable of inhibiting the expression of human ATXN3 in a cell which is expressing human ATXN3.

[0012] In one aspect, the invention provides for an antisense oligonucleotide comprising a contiguous nucleotide sequence comprising the contiguous nucleotides present in SEQ ID NO:1122 except for one or more modified nucleosides and/or one or more modified internucleoside linkages, wherein the antisense oligonucleotide is capable of inhibiting the expression of human ATXN3 in a cell which is expressing human ATXN3; or a pharmaceutically acceptable salt thereof. In some embodiments, the antisense oligonucleotide is more capable of inhibiting the expression of human ATXN3 than human KCNB2 in a cell which is expressing human ATXN3 and human KCNB2. In some embodiments, the one or more modified nucleosides and/or one or more modified internucleoside linkages are, for each residue in SEQ ID NO:1122, independently selected from the options for that residue as shown in Table 15.

[0013] In some embodiments, the antisense oligonucleotide comprises a contiguous nucleotide sequence comprising at least 10, such as at least 12, such as at least 14, such as at least 16 contiguous nucleotides present in SEQ ID NO:1122. In some embodiments, the antisense oligonucleotide comprises the contiguous nucleotide sequence of SEQ ID NO: 1122.

[0014] In some embodiments, the antisense oligonucleotide comprises a contiguous nucleotide sequence comprising the base sequence of an antisense oligonucleotide selected from the group consisting of Compound ID Nos. 1122_82 to 1122_406, shown in Table 11.

[0015] In some embodiments, the antisense oligonucleotide comprises a contiguous nucleotide sequence comprising the nucleoside base sequence and, optionally, the sugar moiety modifications, of an antisense oligonucleotide selected from the group consisting of Compound ID Nos. 1122_91, 1122_107, 1122_154, 1122_155, 1122_156, 1122_157, 1122_158, 1122_167, 1122_172, 1122_175, 1122_294, 1122_296, 1122_359, 1122_384 and 1122_385, shown in Table 14.

[0016] In some embodiments, the antisense oligonucleotide is an LNA gapmer antisense oligonucleotide; or a pharmaceutically acceptable salt thereof. Typically, each LNA cytosine is an LNA 5-methyl cytosine.

[0017] In some embodiments, substantially all, or all, internucleoside linkages between the nucleosides are phosphorothioate internucleoside linkages. In some particular embodiments, one or more of the phosphothioate internucleoside linkages are stereodefined.

[0018] In some embodiments, one or more nucleosides are also or alternatively modified to a 2′-sugar-modified nucleoside.

[0019] In some embodiments, one or more cytosine nucleosides are also or alternatively modified to a 5-methyl cytosine nucleoside.

[0020] In some embodiments, one or more thymine nucleosides are modified to a uracil nucleoside.

[0021] In one aspect, the invention provides for an antisense oligonucleotide comprising a contiguous nucleotide sequence comprising the contiguous nucleotides present in SEQ ID NO:1816 except for one or more modified nucleosides and/or one or more modified internucleoside linkages, wherein the antisense oligonucleotide is capable of inhibiting the expression of human ATXN3 in a cell which is expressing human ATXN3; or a pharmaceutically acceptable salt thereof. In some embodiments, the antisense oligonucleotide is more capable of inhibiting the expression of human ATXN3 than human KCNB2 in a cell which is expressing human ATXN3 and human KCNB2. In some embodiments, the one or more modified nucleosides and/or one or more modified internucleoside linkages are, for each residue in SEQ ID NO:1816, independently selected from the options for that residue as shown in Table 16.

[0022] In some embodiments, the antisense oligonucleotide comprises a contiguous nucleotide sequence comprising at least 10, such as at least 12, such as at least 14, such as at least 16 contiguous nucleotides present in SEQ ID NO:1816. In some embodiments, the antisense oligonucleotide comprises the contiguous nucleotide sequence of SEQ ID NO: 1816.

[0023] In some embodiments, the antisense oligonucleotide comprises a contiguous nucleotide sequence comprising the base sequence of an antisense oligonucleotide selected from the group consisting of Compound ID Nos. 1816_2 to 1816_92, shown in Table 11.

[0024] In some embodiments, the antisense oligonucleotide comprises the nucleoside base sequence and, optionally, the sugar moiety modifications, of an antisense oligonucleotide selected from the group consisting of Compound ID Nos. 1816_13, 1816_15, 1816_28, 1816_41, 1816_42, 1816_43, 1816_60, 1816_61, 1816_64, 1816_65, 1816_68, and 1816_92, as shown in Table 14.

[0025] In some embodiments, the antisense oligonucleotide is an LNA gapmer antisense oligonucleotide; or a pharmaceutically acceptable salt thereof. Typically, each LNA cytosine is an LNA 5-methyl cytosine.

[0026] In some embodiments, substantially all, or all, internucleoside linkages between the nucleosides are phosphorothioate internucleoside linkages. In some particular embodiments, one or more of the phosphothioate internucleoside linkages are stereodefined.

[0027] In some embodiments, one or more nucleosides are also or alternatively modified to a 2′-sugar-modified nucleoside.

[0028] In some embodiments, one or more cytosine nucleosides are also or alternatively modified to a 5-methyl cytosine nucleoside.

[0029] In some embodiments, one or more thymine nucleosides are modified to a uracil nucleoside.

[0030] More details on these or other nucleoside modifications and/or internucleoside linkage modifications are provided in the present disclosure.

[0031] In one aspect, the invention provides for the antisense oligonucleotides disclosed herein, for example an antisense oligonucleotide selected from the group consisting of the compounds shown in the table in Example 13; or a pharmaceutically acceptable salt thereof.

[0032] In one aspect, the invention provides for the antisense oligonucleotide disclosed herein, for example an antisense oligonucleotide selected from the group consisting of the compounds shown in Table 11; or a pharmaceutically acceptable salt thereof.

[0033] In some embodiments, the antisense oligonucleotide is selected from the group consisting of the compounds shown in the table in Example 16.

[0034] In some embodiments, the antisense oligonucleotide is selected from the group consisting of the compounds shown in Table 14.

[0035] In one aspect, the invention particularly provides for an antisense oligonucleotide selected from the group consisting of Compound ID Nos. 1122_91, 1122_107, 1122_154, 1122_155, 1122_156, 1122_157, 1122_158, 1122_167, 1122_172, 1122_175, 1122_294, 1122_296, 1122_359, 1122_384, 1122_385, 1816_13, 1816_15, 1816_28, 1816_41, 1816_42, 1816_43, 1816_60, 1816_61, 1816_64, 1816_65, 1816_68, and 1816_92; or a pharmaceutically acceptable salt thereof.

[0036] In separate and specific aspects, the invention provides for an antisense oligonucleotide as shown in FIG. 12A, 12B, 12C, 12D, 12E, 12F, 12G, 12H, 12I, 12J, 12K, 12L, 12M, 12N, 12O, 12P, 12Q, 12R, 12S, 12T, 12U, 12V, 12W, 12X, 12Y, 12Z or 12AA; or a pharmaceutically acceptable salt thereof.

[0037] An oligonucleotide of the invention as referred to or claimed herein may be in the form of a pharmaceutically acceptable salt, such as a sodium or potassium salt.

[0038] In one aspect, the invention provides for a conjugate comprising an oligonucleotide according to the invention, and at least one conjugate moiety covalently attached to said oligonucleotide.

[0039] In one aspect, the invention provides for a pharmaceutical composition comprising the oligonucleotide or conjugate of the invention and a pharmaceutically acceptable diluent, solvent, carrier, salt and/or adjuvant.

[0040] In one aspect, the invention provides for an in vivo or in vitro method for modulating ATXN3 expression in a target cell which is expressing ATXN3, said method comprising administering an oligonucleotide or conjugate or pharmaceutical composition of the invention in an effective amount to said cell.

[0041] In one aspect, the invention provides for a method for treating or preventing a disease comprising administering a therapeutically or prophylactically effective amount of an oligonucleotide, conjugate or the pharmaceutical composition of the invention to a subject suffering from or susceptible to the disease.

[0042] In some embodiments, the disease is spinocerebellar ataxia, such as spinocerebellar ataxia 3, such as Machado-Joseph disease (MJD).

[0043] In one aspect, the invention provides for the oligonucleotide, conjugate or the pharmaceutical composition of the invention for use in medicine.

[0044] In one aspect, the invention provides for the oligonucleotide, conjugate or the pharmaceutical composition of the invention for use in the treatment or prevention of spinocerebellar ataxia, such as spinocerebellar ataxia 3, such as Machado-Joseph disease (MJD).

[0045] In one aspect, the invention provides for the use of the oligonucleotide, conjugate or the pharmaceutical composition of the invention, for the preparation of a medicament for treatment or prevention of spinocerebellar ataxia, such as spinocerebellar ataxia 3 such as Machado-Joseph disease (MJD).

### BRIEF DESCRIPTION OF THE DRAWINGS

[0046] FIG. 1 displays a drawing of the compound 1122_67 (SEQ ID NO:1122).

[0047] FIG. 2 displays a drawing of the compound 1813_1 (SEQ ID NO:1813).

[0048] FIG. 3 displays a drawing of the compound 1856_1 (SEQ ID NO:1856).

[0049] FIG. 4 displays a drawing of the compound 1812_1 (SEQ ID NO:1812).

[0050] FIG. 5 displays a drawing of the compound 1809_2 (SEQ ID NO:1809).

[0051] FIG. 6 displays a drawing of the compound 1607_1 (SEQ ID NO:1607).

[0052] FIG. 7 displays a drawing of the compound 1122_62 (SEQ ID NO:1122).

[0053] FIG. 8 displays a drawing of the compound 1122_33 (SEQ ID NO:1122).

[0054] FIG. 9 portrays the stability of the compounds 1122_67 and 18131, and 5 reference compounds (i.e. compounds 1100673, 1101657, 1102130, 1103014, and 1102987) in a 24 hour SVPD assay.

[0055] FIG. 10A displays a WES analysis of GM06153 cells treated with different ASOs to obtain reduction of wild type Ataxin 3 (55 kDa) and polyQ extended Ataxin 3 (77 kDa). FIG. 10B displays an analysis of band intensity normalized to HPRT. Wild type Ataxin 3 is represented by the band at 55 kDa, and the polyQ extended Ataxin 3 is represented by the band at 77 kDa. Cells have been treated with 10 uM of ASO for 4 days prior to protein analysis. Data represents cells treated with ASOs in triplicates as mean+−SD. SC, scrambled control oligo.

[0056] FIG. 11 displays a drawing of the compound 1816_12.

[0057] FIGS. 12A-12AA display drawings of the compounds in Table 14 (Example 16). FIG. 12A displays a drawing of the compound 1122_91. FIG. 12B displays a drawing of the compound 1122_107. FIG. 12C displays a drawing of the compound 1122_154. FIG. 12D displays a drawing of the compound 1122_155. FIG. 12E displays a drawing of the compound 1122_156. FIG. 12F displays a drawing of the compound 1122_157. FIG. 12G displays a drawing of the compound 1122_158. FIG. 12H displays a drawing of the compound 1122_167. FIG. 12I displays a drawing of the compound 1122_172. FIG. 12J displays a drawing of the compound 1122_175. FIG. 12K displays a drawing of the compound 1122_294. FIG. 12L displays a drawing of the compound 1122_296. FIG. 12M displays a drawing of the compound 1122_359. FIG. 12N displays a drawing of the compound 1122_384. FIG. 12O displays a drawing of the compound 1122_385. FIG. 12P displays a drawing of the compound 1816_13. FIG. 12Q displays a drawing of the compound 1816_15. FIG. 12R displays a drawing of the compound 1816_28. FIG. 12S displays a drawing of the compound 1816_41. FIG. 12T displays a drawing of the compound 1816_42. FIG. 12U displays a drawing of the compound 1816_43. FIG. 12V displays a drawing of the compound 1816_60. FIG. 12W displays a drawing of the compound 1816_61. FIG. 12X displays a drawing of the compound 1816_64. FIG. 12Y displays a drawing of the compound 1816_65. FIG. 12Z displays a drawing of the compound 1816_68. FIG. 12AA displays a drawing of the compound 1816_92.

[0058] The chemical drawings show the protonated form of the antisense oligonucleotide, and it will be understood that each hydrogen on the sulphur atom in the phosphorothioate internucleoside linkage may independently be present or absent. In a salt form, one or more more of the hydrogens may for example be replaced with a cation, such as a metal cation, such as a sodium cation or a potassium cation.

### DETAILED DESCRIPTION OF THE INVENTION

### I. Definitions

[0059] It should be appreciated that this disclosure is not limited to the compositions and methods described herein as well as the experimental conditions described, as such may vary. It is also to be understood that the terminology used herein is for the purpose of describing certain embodiments only, and is not intended to be limiting, since the scope of the present disclosure will be limited only by the appended claims.

[0060] Unless defined otherwise, all technical and scientific terms used herein have the same meaning as commonly understood by one of ordinary skill in the art to which this disclosure belongs. Although any compositions, methods and materials similar or equivalent to those described herein can be used in the practice or testing of the present invention. All publications mentioned are incorporated herein by reference in their entirety.

[0061] The use of the terms “a,” “an,” “the,” and similar referents in the context of describing the presently claimed invention (especially in the context of the claims) are to be construed to cover both the singular and the plural, unless otherwise indicated herein or clearly contradicted by context.

[0062] Recitation of ranges of values herein are merely intended to serve as a shorthand method of referring individually to each separate value falling within the range, unless otherwise indicated herein, and each separate value is incorporated into the specification as if it were individually recited herein.

[0063] Use of the term “about” is intended to describe values either above or below the stated value in a range of approx. +/−10%; in other embodiments the values may range in value either above or below the stated value in a range of approx. +/−5%; in other embodiments the values may range in value either above or below the stated value in a range of approx. +/−2%; in other embodiments the values may range in value either above or below the stated value in a range of approx. +/−1%. The preceding ranges are intended to be made clear by context, and no further limitation is implied. All methods described herein can be performed in any suitable order unless otherwise indicated herein or otherwise clearly contradicted by context. The use of any and all examples, or exemplary language (e.g., “such as”) provided herein, is intended merely to better illuminate the invention and does not pose a limitation on the scope of the invention unless otherwise claimed. No language in the specification should be construed as indicating any non-claimed element as essential to the practice of the invention.

[0064] As used herein, the terms “treat,” “treating,” “treatment” and “therapeutic use” refer to the elimination, reduction or amelioration of one or more symptoms of a disease or disorder. Specifically, the term “treatment” may refer to both treatment of an existing disease (e.g. a disease or disorder as herein referred to), or prevention of a disease (i.e. prophylaxis). It will therefore be recognized that treatment as referred to herein may, in some embodiments, be prophylactic. As used herein, a “therapeutically effective amount” refers to that amount of a therapeutic agent sufficient to mediate a clinically relevant elimination, reduction or amelioration of such symptoms. An effect is clinically relevant if its magnitude is sufficient to impact the health or prognosis of a recipient subject. A therapeutically effective amount may refer to the amount of therapeutic agent sufficient to delay or minimize the onset of disease. A therapeutically effective amount may also refer to the amount of the therapeutic agent that provides a therapeutic benefit in the treatment or management of a disease.

[0065] The term “oligonucleotide” as used herein is defined as it is generally understood by the skilled person as a molecule comprising two or more covalently linked nucleosides. Such covalently bound nucleosides may also be referred to as nucleic acid molecules or oligomers. Oligonucleotides are commonly made in the laboratory by solid-phase chemical synthesis followed by purification. When referring to a sequence of the oligonucleotide, reference is made to the sequence or order of nucleobase moieties, or modifications thereof, of the covalently linked nucleotides or nucleosides. The oligonucleotide of the invention is man-made, and is chemically synthesized, and is typically purified or isolated. The oligonucleotide of the invention may comprise one or more modified nucleosides or nucleotides.

[0066] The term “Antisense oligonucleotide” as used herein is defined as oligonucleotides capable of modulating expression of a target gene by hybridizing to a target nucleic acid, in particular to a contiguous sequence on a target nucleic acid. The antisense oligonucleotides are not essentially double stranded and are therefore not siRNAs or shRNAs. Preferably, the antisense oligonucleotides of the present invention are single stranded. It is understood that single stranded oligonucleotides of the present invention can form hairpins or intermolecular duplex structures (duplex between two molecules of the same oligonucleotide), as long as the degree of intra or inter self-complementarity is less than 50% across of the full length of the oligonucleotide.

[0067] The term “contiguous nucleotide sequence” refers to the region of the oligonucleotide which is complementary to the target nucleic acid. The term is used interchangeably herein with the term “contiguous nucleobase sequence” and the term “oligonucleotide motif sequence” also referred to as “motif sequence”. The “motif sequence” may also be referred to as the “Oligonucleotide Base Sequence”. In some embodiments all the nucleotides of the oligonucleotide constitute the contiguous nucleotide sequence. In some embodiments the oligonucleotide comprises the contiguous nucleotide sequence, such as a F-G-F′ gapmer region, and may optionally comprise further nucleotide(s), for example a nucleotide linker region which may be used to attach a functional group to the contiguous nucleotide sequence. The nucleotide linker region may or may not be complementary to the target nucleic acid. Advantageously, the contiguous nucleotide sequence is 100% complementary to the target nucleic acid.

[0068] The term “modified oligonucleotide” describes an oligonucleotide comprising one or more modified nucleosides and/or modified internucleoside linkages. The term chimeric” oligonucleotide is a term that has been used in the literature to describe oligonucleotides with modified nucleosides.

[0069] The term “nucleotides” refers to the building blocks of oligonucleotides and polynucleotides, and for the purposes of the present invention include both naturally occurring and non-naturally occurring nucleotides. In nature, nucleotides, such as DNA and RNA nucleotides comprise a ribose sugar moiety, a nucleobase moiety and one or more phosphate groups (which is absent in nucleosides). Nucleosides and nucleotides may also interchangeably be referred to as “units” or “monomers”.

[0070] The term “nucleobase” refers to the purine (e.g. adenine and guanine) and pyrimidine (e.g. uracil, thymine and cytosine) moieties present in nucleosides and nucleotides which form hydrogen bonds in nucleic acid hybridization. In the context of the present invention the term nucleobase also encompasses modified nucleobases which may differ from naturally occurring nucleobases, but are functional during nucleic acid hybridization. In this context “nucleobase” refers to both naturally occurring nucleobases such as adenine, guanine, cytosine, thymidine, uracil, xanthine and hypoxanthine, as well as non-naturally occurring variants. Such variants are for example described in Hirao et al (2012) Accounts of Chemical Research vol 45 page 2055 and Bergstrom (2009) Current Protocols in Nucleic Acid Chemistry Suppl. 37 1.4.1.

[0071] In some embodiments, the “nucleobase moiety” is modified by changing the purine or pyrimidine into a modified purine or pyrimidine, such as substituted purine or substituted pyrimidine, such as a nucleobased selected from isocytosine, pseudoisocytosine, 5-methyl cytosine, 5-thiozolo-cytosine, 5-propynyl-cytosine, 5-propynyl-uracil, 5-bromouracil 5-thiazolo-uracil, 2-thio-uracil, 2′thio-thymine, inosine, diaminopurine, 6-aminopurine, 2-aminopurine, 2,6-diaminopurine and 2-chloro-6-aminopurine.

[0072] The nucleobase moieties may be indicated by the letter code for each corresponding nucleobase, e.g. A, T, G, C or U, wherein each letter may optionally include modified nucleobases of equivalent function. For example, in the exemplified oligonucleotides, the nucleobase moieties are selected from A, T, G, C, and 5-methyl cytosine. Optionally, for LNA gapmers, 5-methyl cytosine LNA nucleosides may be used.

[0073] The term “modified nucleoside” or “nucleoside modification” as used herein refers to nucleosides modified as compared to the equivalent DNA or RNA nucleoside by the introduction of one or more modifications of the sugar moiety or the (nucleo)base moiety. In a preferred embodiment, the modified nucleoside comprises a modified sugar moiety. The term modified nucleoside may also be used herein interchangeably with the term “nucleoside analogue” or modified “units” or modified “monomers”. Nucleosides with an unmodified DNA or RNA sugar moiety are termed DNA or RNA nucleosides herein. Nucleosides with modifications in the base region of the DNA or RNA nucleoside are still generally termed DNA or RNA if they allow Watson Crick base pairing.

[0074] The oligomer of the invention may comprise one or more nucleosides which have a modified sugar moiety, i.e. a modification of the sugar moiety when compared to the ribose sugar moiety found in DNA and RNA.

[0075] Numerous nucleosides with modification of the ribose sugar moiety have been made, primarily with the aim of improving certain properties of oligonucleotides, such as affinity and/or nuclease resistance.

[0076] Such modifications include those where the ribose ring structure is modified, e.g. by replacement with a hexose ring (HNA), or a bicyclic ring, which typically have a biradicle bridge between the C2 and C4 carbons on the ribose ring (LNA), or an unlinked ribose ring which typically lacks a bond between the C2 and C3 carbons (e.g. UNA). Other sugar modified nucleosides include, for example, bicyclohexose nucleic acids (WO2011/017521) or tricyclic nucleic acids (WO2013/154798). Modified nucleosides also include nucleosides where the sugar moiety is replaced with a non-sugar moiety, for example in the case of peptide nucleic acids (PNA), or morpholino nucleic acids.

[0077] As used herein, “sugar modifications” also include modifications made via altering the substituent groups on the ribose ring to groups other than hydrogen, or the 2′—OH group naturally found in DNA and RNA nucleosides. Substituents may, for example be introduced at the 2′, 3′, 4′ or 5′ positions.

[0078] As used herein, a “2′ sugar modified nucleoside” refers to a nucleoside which has a substituent other than H or —OH at the 2′ position (2′ substituted nucleoside) or comprises a 2′ linked biradicle capable of forming a bridge between the 2′ carbon and a second carbon in the ribose ring, such as LNA (2′-4′ biradicle bridged) nucleosides.

[0079] Indeed, much focus has been spent on developing 2′ substituted nucleosides, and numerous 2′ substituted nucleosides have been found to have beneficial properties when incorporated into oligonucleotides. For example, the 2′ modified sugar may provide enhanced binding affinity and/or increased nuclease resistance to the oligonucleotide. Examples of 2′ substituted modified nucleosides are 2′-O-alkyl-RNA, 2′-O-methyl-RNA, 2′-alkoxy-RNA, 2′-O-methoxyethyl-RNA (MOE), 2′-amino-DNA, 2′-Fluoro-RNA, and 2′-F-ANA nucleoside. For further examples, please see e.g. Freier & Altmann; Nucl. Acid Res., 1997, 25, 4429-4443 and Uhlmann; Curr. Opinion in Drug Development, 2000, 3(2), 293-213, and Deleavey and Damha, Chemistry and Biology 2012, 19, 937. Below are illustrations of some 2′ substituted modified nucleosides.

[chemical structure]

[0080] In relation to the present invention 2′ substituted does not include 2′ bridged molecules like LNA.

[0081] As used herein, a “Locked Nucleic Acid (LNA) nucleoside” is a 2′-modified nucleoside which comprises a biradical linking the C2′ and C4′ of the ribose sugar ring of said nucleoside (also referred to as a “2′-4′ bridge”), which restricts or locks the conformation of the ribose ring. These nucleosides are also termed bridged nucleic acid or bicyclic nucleic acid (BNA) in the literature. The locking of the conformation of the ribose is associated with an enhanced affinity of hybridization (duplex stabilization) when the LNA is incorporated into an oligonucleotide for a complementary RNA or DNA molecule. This can be routinely determined by measuring the melting temperature of the oligonucleotide/complement duplex.

[0082] Non limiting, exemplary LNA nucleosides are disclosed in WO 99/014226, WO 00/66604, WO 98/039352, WO 2004/046160, WO 00/047599, WO 2007/134181, WO 2010/077578, WO 2010/036698, WO 2007/090071, WO 2009/006478, WO 2011/156202, WO 2008/154401, WO 2009/067647, WO 2008/150729, Morita et al., Bioorganic & Med. Chem. Lett. 12, 73-76, Seth et al. J. Org. Chem. 2010, Vol 75(5) pp. 1569-81, and Mitsuoka et al., Nucleic Acids Research 2009, 37(4), 1225-1238, and Wan and Seth, J. Medical Chemistry 2016, 59, 9645-9667.

[0083] Further non limiting, exemplary LNA nucleosides are disclosed in Scheme 1:

[chemical structure]

[chemical structure]

[0084] Particular LNA nucleosides are beta-D-oxy-LNA, 6′-methyl-beta-D-oxy LNA such as (S)-6′-methyl-beta-D-oxy-LNA (ScET) and ENA. A particularly advantageous LNA is beta-D-oxy-LNA.

[0085] As used herein, the term “modified internucleoside linkage” is defined as generally understood by the skilled person as linkages other than phosphodiester (PO) linkages, that covalently couples two nucleosides together. The oligonucleotides of the invention may therefore comprise modified internucleoside linkages. In some embodiments, the modified internucleoside linkage increases the nuclease resistance of the oligonucleotide compared to a phosphodiester linkage. For naturally occurring oligonucleotides, the internucleoside linkage includes phosphate groups creating a phosphodiester bond between adjacent nucleosides. Modified internucleoside linkages are particularly useful in stabilizing oligonucleotides for in vivo use, and may serve to protect against nuclease cleavage at regions of DNA or RNA nucleosides in the oligonucleotide of the invention, for example within the gap region of a gapmer oligonucleotide, as well as in regions of modified nucleosides, such as region F and F′.

[0086] In an embodiment, the oligonucleotide comprises one or more internucleoside linkages modified from the natural phosphodiester, such one or more modified internucleoside linkages that is for example more resistant to nuclease attack. Nuclease resistance may be determined by incubating the oligonucleotide in blood serum or by using a nuclease resistance assay (e.g. snake venom phosphodiesterase (SVPD)), both are well known in the art. Internucleoside linkages which are capable of enhancing the nuclease resistance of an oligonucleotide are referred to as nuclease resistant internucleoside linkages. In some embodiments at least 50% of the internucleoside linkages in the oligonucleotide, or contiguous nucleotide sequence thereof, are modified, such as at least 60%, such as at least 70%, such as at least 80 or such as at least 90% of the internucleoside linkages in the oligonucleotide, or contiguous nucleotide sequence thereof, are nuclease resistant internucleoside linkages. In some embodiments all of the internucleoside linkages of the oligonucleotide, or contiguous nucleotide sequence thereof, are nuclease resistant internucleoside linkages. It will be recognized that, in some embodiments the nucleosides which link the oligonucleotide of the invention to a non-nucleotide functional group, such as a conjugate, may be phosphodiester.

[0087] Particular examples of modified internucleoside linkages include phosphorothioate internucleoside linkages, stereodefined phosphorothioate linkages, 3-methoxypropylphosphonothioate (MOPS) internucleoside linkages and 3-methoxypropylphosphonate (MOPO) internucleoside linkages. MOPS and MOPO internucleoside linkages are illustrated below, where “B” represents the nucleobase. R¹ may represent the linkage to a 3′—OH group, unless it is placed at the 3′-end of an oligonucleotide. R² and R³ represent other optional sugar modifications described herein, and may, e.g., form the bridge in an LNA nucleoside or represent cET or hydrogen (H). For further details on MOPS and MOPO linkages, see Migawa et al., Nucleic Acids Research, Volume 47, Issue 11, 20 Jun. 2019, Pages 5465-5479.

[chemical structure]

[0088] A preferred modified internucleoside linkage is phosphorothioate. Phosphorothioate internucleoside linkages are particularly useful due to nuclease resistance, beneficial pharmacokinetics and ease of manufacture. In some embodiments at least 50% of the internucleoside linkages in the oligonucleotide, or contiguous nucleotide sequence thereof, are phosphorothioate, such as at least 60%, such as at least 70%, such as at least 80% or such as at least 90% of the internucleoside linkages in the oligonucleotide, or contiguous nucleotide sequence thereof, are phosphorothioate. In some embodiments all of the internucleoside linkages of the oligonucleotide, or contiguous nucleotide sequence thereof, are phosphorothioate.

[0089] Nuclease resistant linkages, such as phosphorothioate linkages, are particularly useful in oligonucleotide regions capable of recruiting nuclease when forming a duplex with the target nucleic acid, such as region G for gapmers. Phosphorothioate linkages may, however, also be useful in non-nuclease recruiting regions and/or affinity enhancing regions such as regions F and F′ for gapmers. Gapmer oligonucleotides may, in some embodiments comprise one or more phosphodiester linkages in region F or F′, or both region F and F′, which the internucleoside linkage in region G may be fully phosphorothioate.

[0090] Advantageously, all the internucleoside linkages in the contiguous nucleotide sequence of the oligonucleotide are phosphorothioate linkages.

[0091] It is recognized that, as disclosed in EP2 742 135, antisense oligonucleotide may comprise other internucleoside linkages (other than phosphodiester and phosphorothioate), for example alkyl phosphonate/methyl phosphonate internucleosides, which according to EP2 742 135 may for example be tolerated in an otherwise DNA phosphorothioate gap region.

[0092] As used herein, “phosphorothioate linkages” refer to internucleoside phosphate linkages where one of the non-bridging oxygens has been substituted with a sulfur. The substitution of one of the non-bridging oxygens with a sulfur introduces a chiral center, and as such within a single phosphorothioate oligonucleotide, each phosphorothioate internucleoside linkage will be either in the S (Sp) or R (Rp) stereoisoforms. Such internucleoside linkages are referred to as “chiral internucleoside linkages”. By comparison, phosphodiester internucleoside linkages are non-chiral as they have two non-terminal oxygen atoms.

[0093] The designation of the chirality of a stereocenter is determined by standard Cahn-Ingold-Prelog rules (CIP priority rules) first published in Cahn, R. S.; Ingold, C. K.; Prelog, V. (1966). “Specification of Molecular Chirality”. Angewandte Chemie International Edition. 5 (4): 385-415. doi:10.1002/anie.196603851.

[0094] During standard oligonucleotide synthesis, the stereoselectivity of the coupling and the following sulfurization is not controlled. For this reason, when producing an oligonucleotide by standard oligonucleotide synthetic methods, the stereoconfiguration of any specific phosphorothioate internucleoside linkage introduced may become either Sp or Rp. The resulting preparation of such an oligonucleotide may therefore contain as many as 2^{X} different individual phosphorothioate diastereoisomers, where X is the number of phosphorothioate internucleoside linkages. Such oligonucleotides are referred to as “stereorandom phosphorothioate oligonucleotides” herein, and do not contain any stereodefined internucleoside linkages. Stereorandom phosphorothioate oligonucleotides are therefore mixtures of individual diastereoisomers originating from the non-stereodefined synthesis. In this context the mixture is defined as up to 2^{X} different phosphorothioate diastereoisomers. A stereorandom phosphorothioate internucleoside linkage may also be referred to as a stereo-undefined phosphorothioate internucleoside linkage or, using HELM-annotations, [sP] or (abbreviated) “X”, herein (see Examples 13 and 16).

[0095] As used herein, a “stereodefined internucleoside linkage” refers to an internucleoside linkage which introduces a specific chiral center into the oligonucleotide, which exists in predominantly one stereoisomeric form, either R or S within a population of individual oligonucleotide molecules.

[0096] It should be recognized that stereoselective oligonucleotide synthesis methods used in the art typically provide at least about 90% or at least about 95% stereoselectivity at each internucleoside linkage stereocenter, and as such up to about 10%, such as about 5% of oligonucleotide molecules may have the alternative stereo isomeric form.

[0097] In some embodiments the stereoselectivity of each stereodefined phosphorothioate stereocenter is at least about 90%. In some embodiments the stereoselectivity of each stereodefined phosphorothioate stereocenter is at least about 95%.

[0098] As used herein, “stereodefined phosphorothioate linkages” refer to phosphorothioate linkages which have been chemically synthesized in either the Rp or Sp configuration within a population of individual oligonucleotide molecules, such as at least about 90% or at least about 95% stereoselectivity at each stereocenter (either Rp or Sp), and as such up to about 10%, such as about 5% of oligonucleotide molecules may have the alternative stereo isomeric form. The stereo configurations of the phosphorothioate internucleoside linkages are presented below

[chemical structure]

where the 3′ R group represents the 3′ position of the adjacent nucleoside (a 5′ nucleoside), and the 5′ R group represents the 5′ position of the adjacent nucleoside (a 3′ nucleoside).

[0099] Rp internucleoside linkages may also be represented as srP, and Sp internucleoside linkages may be represented as ssP herein. Using HELM annotations, a stereodefined Sp phosphorothioate internucleoside linkage may also be referred to as [ssP] or abbreviated as “S” herein (see Examples 13 and 16).

[0100] In some embodiments the stereoselectivity of each stereodefined phosphorothioate stereocenter is at least about 97%. In some embodiments the stereoselectivity of each stereodefined phosphorothioate stereocenter is at least about 98%. In some embodiments the stereoselectivity of each stereodefined phosphorothioate stereocenter is at least about 99%.

[0101] In some embodiments a stereoselective internucleoside linkage is in the same stereoisomeric form in at least 97%, such as at least 98%, such as at least 99%, or (essentially) all of the oligonucleotide molecules present in a population of the oligonucleotide molecule.

[0102] Stereoselectivity can be measured in a model system only having an achiral backbone (i.e. phosphodiesters) it is possible to measure the stereoselectivity of each monomer by e.g. coupling a stereodefined monomer to the following model-system “5′ t-po-t-po-t-po 3”. The result of this will then give: 5′ DMTr-t-srp-t-po-t-po-t-po 3′ or 5′ DMTr-t-ssp-t-po-t-po-t-po 3′ which can be separated using HPLC. The stereoselectivity is determined by integrating the UV signal from the two possible compounds and giving a ratio of these e.g. 98:2, 99:1 or >99:1.

[0103] It will be understood that the stereo % purity of a specific single diastereoisomer (a single stereodefined oligonucleotide molecule) will be a function of the coupling selectivity for the defined stereocenter at each internucleoside position, and the number of stereodefined internucleoside linkages to be introduced. By way of example, if the coupling selectivity at each position is 97%, the resulting purity of the stereodefined oligonucleotide with 15 stereodefined internucleoside linkages will be 0.97¹⁵, i.e. 63% of the desired diastereoisomer as compared to 37% of the other diastereoisomers. The purity of the defined diastereoisomer may after synthesis be improved by purification, for example by HPLC, such as ion exchange chromatography or reverse phase chromatography.

[0104] In some embodiments, a stereodefined oligonucleotide refers to a population of an oligonucleotide wherein at least about 40%, such as at least about 50% of the population is of the desired diastereoisomer.

[0105] Alternatively stated, in some embodiments, a stereodefined oligonucleotide refers to a population of oligonucleotides wherein at least about 40%, such as at least about 50%, of the population consists of the desired (specific) stereodefined internucleoside linkage motif (also termed stereodefined motif).

[0106] For stereodefined oligonucleotides which comprise both stereorandom and stereodefined internucleoside stereocenters, the purity of the stereodefined oligonucleotide is determined with reference to the % of the population of the oligonucleotide which retains the defined stereodefined internucleoside linkage motif(s), the stereorandom linkages are disregarded in the calculation.

[0107] As used herein, a “stereodefined oligonucleotide” refers to an oligonucleotide wherein at least one of the internucleoside linkages is a stereodefined internucleoside linkage.

[0108] As used herein, a “stereodefined phosphorothioate oligonucleotide” refers to an oligonucleotide wherein at least one of the internucleoside linkages is a stereodefined phosphorothioate internucleoside linkage.

[0109] As used herein, the term “complementarity” describes the capacity for Watson-Crick base-pairing of nucleosides/nucleotides. Watson-Crick base pairs are guanine (G)-cytosine (C) and adenine (A)—thymine (T)/uracil (U). It will be understood that oligonucleotides may comprise nucleosides with modified nucleobases, for example 5-methyl cytosine is often used in place of cytosine, and as such the term complementarity encompasses Watson Crick base-paring between non-modified and modified nucleobases (see for example Hirao et al (2012) Accounts of Chemical Research vol 45 page 2055 and Bergstrom (2009) Current Protocols in Nucleic Acid Chemistry Suppl. 37 1.4.1).

[0110] As used herein, the term “% complementary” refers to the number of nucleotides in percent of a contiguous nucleotide sequence in a nucleic acid molecule (e.g. oligonucleotide) which, at a given position, are complementary to (i.e. form Watson Crick base pairs with) a contiguous sequence of nucleotides, at a given position of a separate nucleic acid molecule (e.g. the target nucleic acid or target sequence). The percentage is calculated by counting the number of aligned bases that form pairs between the two sequences (when aligned with the target sequence 5′-3′ and the oligonucleotide sequence from 3′-5′), dividing by the total number of nucleotides in the oligonucleotide and multiplying by 100. In such a comparison a nucleobase/nucleotide which does not align (form a base pair) is termed a mismatch. Preferably, insertions and deletions are not allowed in the calculation of % complementarity of a contiguous nucleotide sequence.

[0111] As used herein, the term “fully complementary” refers to 100% complementarity.

[0112] As used herein, the term “identity” refers to the proportion of nucleotides (expressed in percent) of a contiguous nucleotide sequence in a nucleic acid molecule (e.g. oligonucleotide) which across the contiguous nucleotide sequence, are identical to a reference sequence (e.g. a sequence motif). The percentage of identity is thus calculated by counting the number of aligned bases that are identical (a match) between two sequences (e.g. in the contiguous nucleotide sequence of the compound of the invention and in the reference sequence), dividing that number by the total number of nucleotides in the aligned region and multiplying by 100. Therefore, Percentage of Identity=(Matches×100)/Length of aligned region (e.g. the contiguous nucleotide sequence). Insertions and deletions are not allowed in the calculation the percentage of identity of a contiguous nucleotide sequence. It will be understood that in determining identity, chemical modifications of the nucleobases are disregarded as long as the functional capacity of the nucleobase to form Watson Crick base pairing is retained (e.g. 5-methyl cytosine is considered identical to a cytosine for the purpose of calculating % identity).

[0113] As used herein, the term “hybridizing” or “hybridizes” refers to two nucleic acid strands (e.g. an oligonucleotide and a target nucleic acid) forming hydrogen bonds between base pairs on opposite strands thereby forming a duplex. The affinity of the binding between two nucleic acid strands is the strength of the hybridization. It is often described in terms of the melting temperature (Tₘ) defined as the temperature at which half of the oligonucleotides are duplexed with the target nucleic acid. At physiological conditions Tₘ is not strictly proportional to the affinity (Mergny and Lacroix, 2003, Oligonucleotides 13:515-537). The standard state Gibbs free energy ΔG° is a more accurate representation of binding affinity and is related to the dissociation constant (K_{d}) of the reaction by ΔG°=−RTln(K_{d}), where R is the gas constant and T is the absolute temperature. Therefore, a very low ΔG° of the reaction between an oligonucleotide and the target nucleic acid reflects a strong hybridization between the oligonucleotide and target nucleic acid. ΔG° is the energy associated with a reaction where aqueous concentrations are 1M, the pH is 7, and the temperature is 37° C. The hybridization of oligonucleotides to a target nucleic acid is a spontaneous reaction and for spontaneous reactions ΔG° is less than zero. ΔG° can be measured experimentally, for example, by use of the isothermal titration calorimetry (ITC) method as described in Hansen et al., 1965, Chem. Comm. 36-38 and Holdgate et al., 2005, Drug Discov Today. The skilled person will know that commercial equipment is available for ΔG° measurements. ΔG° can also be estimated numerically by using the nearest neighbor model as described by SantaLucia, 1998, Proc Natl Acad Sci USA. 95: 1460-1465 using appropriately derived thermodynamic parameters described by Sugimoto et al., 1995, Biochemistry 34:11211-11216 and McTigue et al., 2004, Biochemistry 43:5388-5405. In order to have the possibility of modulating its intended nucleic acid target by hybridization, oligonucleotides of the present invention hybridize to a target nucleic acid with estimated ΔG° values below −10 kcal for oligonucleotides that are 10-30 nucleotides in length. In some embodiments the degree or strength of hybridization is measured by the standard state Gibbs free energy ΔG°. The oligonucleotides may hybridize to a target nucleic acid with estimated ΔG° values below the range of −10 kcal, such as below −15 kcal, such as below −20 kcal and such as below −25 kcal for oligonucleotides that are 8-30 nucleotides in length. In some embodiments the oligonucleotides hybridize to a target nucleic acid with an estimated ΔG° value of −10 to −60 kcal, such as −12 to −40, such as from −15 to −30 kcal or −16 to −27 kcal such as −18 to −25 kcal.

[0114] As used herein, the term “target nucleic acid” refers to the nucleic acid which encodes a mammalian ATXN3 protein and may for example be a gene, a ATXN3 RNA, a mRNA, a pre-mRNA, a mature mRNA or a cDNA sequence. The target may therefore be referred to as an “ATXN3 target nucleic acid”.

[0115] In some embodiments, the target nucleic acid encodes a human ATXN3 protein, such as the human ATXN3 gene encoding the pre-mRNA sequence provided herein as SEQ ID NO:1. Thus, the target nucleic acid may be SEQ ID NO:1.

[0116] In some embodiments, the target nucleic acid encodes a mouse ATXN3 protein. Suitably, the target nucleic acid encoding a mouse ATXN3 protein comprises a sequence as shown in SEQ ID NO: 3.

[0117] In some embodiments, the target nucleic acid encodes a cynomolgus monkey ATXN3 protein. Suitably, the target nucleic acid encoding a cynomolgus monkey ATXN3 protein comprises a sequence as shown in SEQ ID NO: 2.

[0118] If employing the oligonucleotide of the invention in research or diagnostics the target nucleic acid may be a cDNA or a synthetic nucleic acid derived from DNA or RNA.

[0119] For in vivo or in vitro application, the oligonucleotide of the invention is typically capable of inhibiting the expression of the ATXN3 target nucleic acid in a cell which is expressing the ATXN3 target nucleic acid. The contiguous sequence of nucleobases of the oligonucleotide of the invention is typically complementary to the ATXN3 target nucleic acid, as measured across the length of the oligonucleotide, optionally with the exception of one or two mismatches, and optionally excluding nucleotide based linker regions which may link the oligonucleotide to an optional functional group such as a conjugate, or other non-complementary terminal nucleotides (e.g. region D′ or D″). The target nucleic acid is a messenger RNA, such as a mature mRNA or a pre-mRNA which encodes mammalian ATXN3 protein, such as human ATXN3, e.g. the human ATXN3 pre-mRNA sequence, such as that disclosed as SEQ ID NO:1, or ATXN3 mature mRNA. Further, the target nucleic acid may be a cynomolgus monkey ATXN3 pre-mRNA sequence, such as that disclosed as SEQ ID NO:1, or a cynomolgus monkey ATXN3 mature mRNA. Further, the target nucleic acid may be a mouse ATXN3 pre-mRNA sequence, such as that disclosed as SEQ ID NO:3, or mouse ATXN3 mature mRNA. SEQ ID NOS:1-3 are DNA sequences—it will be understood that target RNA sequences have uracil (U) bases in place of the thymidine bases (T).

TABLE 1
Target nucleic acids

| Target Nucleic Acid | Sequence ID |
|---|---|
| ATXN3 Homo sapiens pre-mRNA | SEQ ID NO: 1 |
| ATXN3 Macaca fascicularis pre-mRNA | SEQ ID NO: 2 |
| ATXN3 Mus musculus mRNA | SEQ ID NO: 3 |

[0120] In some embodiments, the oligonucleotide of the invention targets SEQ ID NO: 1.

[0121] In some embodiments, the oligonucleotide of the invention targets SEQ ID NO:2.

[0122] In some embodiments, the oligonucleotide of the invention targets SEQ ID NO: 3.

[0123] In some embodiments, the oligonucleotide of the invention targets SEQ ID NO:1 and SEQ ID NO:2.

[0124] In some embodiments, the oligonucleotide of the invention targets SEQ ID NO:1 and SEQ ID NO:3.

[0125] In some embodiments, the oligonucleotide of the invention targets SEQ ID NO:1, SEQ ID NO:2 and SEQ ID NO:3.

[0126] As used herein, the term “target sequence” refers to a sequence of nucleotides present in the target nucleic acid which comprises the nucleobase sequence which is complementary to the oligonucleotide of the invention. In some embodiments, the target sequence consists of a region on the target nucleic acid which is complementary to the contiguous nucleotide sequence of the oligonucleotide of the invention.

[0127] Herein are provided numerous target sequence regions, as defined by regions of the human ATXN3 pre-mRNA (using SEQ ID NO:1 as a reference) which may be targeted by the oligonucleotides of the invention.

[0128] In some embodiments the target sequence is longer than the complementary sequence of a single oligonucleotide, and may, for example represent a preferred region of the target nucleic acid which may be targeted by several oligonucleotides of the invention.

[0129] The oligonucleotide of the invention comprises a contiguous nucleotide sequence which is complementary to or hybridizes to the target nucleic acid, such as a sub-sequence of the target nucleic acid, such as a target sequence described herein.

[0130] The oligonucleotide comprises a contiguous nucleotide sequence which are complementary to a target sequence present in the target nucleic acid molecule. The contiguous nucleotide sequence (and therefore the target sequence) comprises at least 10 contiguous nucleotides, such as 9, 10, 11, 12, 13, 14, 15, 16, 17, 18, 19, 20, 21, 22, 23, 24, 25, 26, 27, 28, 29 or 30 contiguous nucleotides, such as from 12-25, such as from 14-18 contiguous nucleotides.

[0131] As used herein, the term “target sequence region” refers to an antisense oligonucleotide, 10-30 nucleotides in length, wherein said antisense oligonucleotide comprises a contiguous nucleotide sequence 10-30 nucleotides in length, wherein the contiguous nucleotide sequence is at least 90% complementary to a region of SEQ ID NO:1. The region of SEQ ID NO:1 to which the antisense oligonucleotide of the invention is complementary to is referred to as the target sequence region.

[0132] In some embodiments the target sequence region is AAGAGTAAAATATGGGT (SEQ ID NO:1093).

[0133] In some embodiments the target sequence region is GAATGTAAAAGTGTACAG (SEQ ID NO:1094).

[0134] In some embodiments the target sequence region is GGAATGTAAAAGTGTACA (SEQ ID NO:1095).

[0135] In some embodiments the target sequence region is GGGAATGTAAAAGTGTAC (SEQ ID NO:1096).

[0136] In some embodiments the target sequence region is TTGATGGTATAATGAAGAA (SEQ ID NO:1097).

[0137] In some embodiments the target sequence region is GGAAGATGTAAATAAGATT (SEQ ID NO:1098).

[0138] In some embodiments, the target sequence region is AAGATGTAAATAAGATTC (SEQ ID NO:1992).

[0139] It is to be understood that target RNA sequences have uracil (U) bases in place of any thymidine (T) bases.

[0140] As used herein, the term “off-target sequence” refers to a sequence of nucleotides comprising a nucleobase sequence which may be partially complementary to an oligonucleotide of the invention but which is present in another nucleic acid than the target (ATXN3) nucleic acid.

[0141] As used herein, the term “target cell” refers to a cell which is expressing the target nucleic acid. In some embodiments the target cell may be in vivo or in vitro. In some embodiments the target cell is a mammalian cell such as a rodent cell, such as a mouse cell or a rat cell, or a primate cell such as a monkey cell (e.g. a cynomolgus monkey cell) or a human cell.

[0142] In preferred embodiments the target cell expresses human ATXN3 mRNA, such as the ATXN3 pre-mRNA, e.g. SEQ ID NO:1, or ATXN3 mature mRNA. In some embodiments the target cell expresses monkey ATXN3 mRNA, such as the ATXN3 pre-mRNA, e.g. SEQ ID NO:2, or ATXN3 mature mRNA. In some embodiments the target cell expresses mouse ATXN3 mRNA, such as the ATXN3 pre-mRNA, e.g. SEQ ID NO:3, or ATXN3 mature mRNA. The poly A tail of ATXN3 mRNA is typically disregarded for antisense oligonucleotide targeting.

[0143] As used herein, the term “naturally occurring variant” refers to variants of ATXN3 gene or transcripts which originate from the same genetic loci as the target nucleic acid, but may differ for example, by virtue of degeneracy of the genetic code causing a multiplicity of codons encoding the same amino acid, or due to alternative splicing of pre-mRNA, or the presence of polymorphisms, such as single nucleotide polymorphisms (SNPs), and allelic variants. Based on the presence of the sufficient complementary sequence to the oligonucleotide, the oligonucleotide of the invention may therefore target the target nucleic acid and naturally occurring variants thereof.

[0144] The Homo sapiens ATXN3 gene is located at chromosome 14, 92058552..92106621, complement (NC_000014.9, Gene ID 4287).

[0145] In some embodiments, the naturally occurring variants have at least 95% such as at least 98% or at least 99% homology to a mammalian ATXN3 target nucleic acid, such as a target nucleic acid selected form the group consisting of SEQ ID NOS: 1, 2 and 3. In some embodiments the naturally occurring variants have at least 99% homology to the human ATXN3 target nucleic acid of SEQ ID NO:1.

[0146] As used herein, the term “modulation of expression” refers to an overall term for an oligonucleotide's ability to alter the amount of ATXN3 protein or ATXN3 mRNA when compared to the amount of ATXN3 or ATXN3 mRNA prior to administration of the oligonucleotide. Alternatively modulation of expression may be determined by reference to a control experiment. It is generally understood that the control is an individual or target cell treated with a saline composition or an individual or target cell treated with a non-targeting oligonucleotide (mock).

[0147] One type of modulation is an oligonucleotide's ability to inhibit, down-regulate, reduce, suppress, remove, stop, block, prevent, lessen, lower, avoid or terminate expression of ATXN3, e.g. by degradation of ATXN3 mRNA.

[0148] As used herein, a “high affinity modified nucleoside” refers to a modified nucleoside which, when incorporated into the oligonucleotide enhances the affinity of the oligonucleotide for its complementary target, for example as measured by the melting temperature (T^{m}). A high affinity modified nucleoside of the present invention preferably result in an increase in melting temperature between +0.5 to +12° C., more preferably between +1.5 to +10° C. and most preferably between +3 to +8° C. per modified nucleoside. Numerous high affinity modified nucleosides are known in the art and include for example, many 2′ substituted nucleosides as well as locked nucleic acids (LNA) (see e.g. Freier & Altmann; Nucl. Acid Res., 1997, 25, 4429-4443 and Uhlmann; Curr. Opinion in Drug Development, 2000, 3(2), 293-213).

[0149] As used herein, the term “RNase H activity” refers to the ability of an antisense oligonucleotide to recruit RNase H when in a duplex with a complementary RNA molecule. WO 01/23613 provides in vitro methods for determining RNaseH activity, which may be used to determine the ability to recruit RNaseH. Typically an oligonucleotide is deemed capable of recruiting RNase H if it, when provided with a complementary target nucleic acid sequence, has an initial rate, as measured in pmol/l/min, of at least 5%, such as at least 10% or more than 20% of the of the initial rate determined when using a oligonucleotide having the same base sequence as the modified oligonucleotide being tested, but containing only DNA monomers with phosphorothioate linkages between all monomers in the oligonucleotide, and using the methodology provided by Example 91-95 of WO01/23613 (hereby incorporated by reference). For use in determining RHase H activity, recombinant human RNase H1 is available from Lubio Science GmbH, Lucerne, Switzerland.

[0150] The antisense oligonucleotide of the invention, or contiguous nucleotide sequence thereof may be a gapmer. The antisense gapmers are commonly used to inhibit a target nucleic acid via RNase H mediated degradation.

[0151] As used herein, the term “gapmer oligonucleotide” refers to an oligonucleotide that comprises at least three distinct structural regions—a 5′-flank, a gap and a 3′-flank (F-G-F′)—in the ′5→3′ orientation. The “gap” region (G) comprises a stretch of contiguous DNA nucleotides which enable the oligonucleotide to recruit RNase H. The gap region is flanked by a 5′ flanking region (F) comprising one or more sugar modified nucleosides, advantageously high affinity sugar modified nucleosides, and by a 3′ flanking region (F′) comprising one or more sugar modified nucleosides, advantageously high affinity sugar modified nucleosides. The one or more sugar modified nucleosides in region F and F′ enhance the affinity of the oligonucleotide for the target nucleic acid (i.e. are affinity enhancing sugar modified nucleosides). In some embodiments, the one or more sugar modified nucleosides in region F and F′ are 2′ sugar modified nucleosides, such as high affinity 2′ sugar modifications, such as independently selected from LNA and 2′-MOE.

[0152] In a gapmer design, the 5′ and 3′ most nucleosides of the gap region are DNA nucleosides, and are positioned adjacent to a sugar modified nucleoside of the 5′ (F) or 3′ (F′) region respectively. The flanks may further defined by having at least one sugar modified nucleoside at the end most distant from the gap region, i.e. at the 5′ end of the 5′ flank and at the 3′ end of the 3′ flank.

[0153] Regions F-G-F′ form a contiguous nucleotide sequence. Antisense oligonucleotides of the invention, or the contiguous nucleotide sequence thereof, may comprise a gapmer region of formula F-G-F′.

[0154] The overall length of the gapmer design F-G-F′ may be, for example 12 to 32 nucleosides, such as 13 to 24, such as 14 to 22 nucleosides, Such as from 14 to17, such as 16 to 18 nucleosides.

[0155] By way of example, the gapmer oligonucleotide of the present invention can be represented by the following formulae:

F₁₋₈-G₅₋₁₆-F′₁₋₈, such as

F₁₋₈-G₇₋₁₆-F′₂₋₈

with the proviso that the overall length of the gapmer regions F-G-F′ is at least 12, such as at least 14 nucleotides in length. Regions F, G and F′ are further defined below and can be incorporated into the F-G-F′ formula.

[0156] As used herein, “region G (gap region)” of the gapmer refers to a region of nucleosides which enables the oligonucleotide to recruit RNaseH, such as human RNase H1, typically DNA nucleosides. RNaseH is a cellular enzyme which recognizes the duplex between DNA and RNA, and enzymatically cleaves the RNA molecule. Suitably gapmers may have a gap region (G) of at least 5 or 6 contiguous DNA nucleosides, such as 5-16 contiguous DNA nucleosides, such as 6-15 contiguous DNA nucleosides, such as 7-14 contiguous DNA nucleosides, such as 8-12 contiguous DNA nucleotides, such as 8-12 contiguous DNA nucleotides in length. The gap region G may, in some embodiments consist of 6, 7, 8, 9, 10, 11, 12, 13, 14, 15 or 16 contiguous DNA nucleosides. One or more cytosine (C) DNA in the gap region may in some instances be methylated (e.g. when a DNA c is followed by a DNA g) such residues are either annotated as 5-methyl-cytosine (^{me}C). In some embodiments the gap region G may consist of 6, 7, 8, 9, 10, 11, 12, 13, 14, 15 or 16 contiguous phosphorothioate linked DNA nucleosides. In some embodiments, all internucleoside linkages in the gap are phosphorothioate linkages. Whilst traditional gapmers have a DNA gap region, there are numerous examples of modified nucleosides which allow for RNaseH recruitment when they are used within the gap region. Modified nucleosides which have been reported as being capable of recruiting RNaseH when included within a gap region include, for example, alpha-L-LNA, C4′ alkylated DNA (as described in PCT/EP2009/050349 and Vester et al., Bioorg. Med. Chem. Lett. 18 (2008) 2296-2300, both incorporated herein by reference), arabinose derived nucleosides like ANA and 2′F-ANA (Mangos et al. 2003 J. AM. CHEM. SOC. 125, 654-661), UNA (unlocked nucleic acid) (as described in Fluiter et al., Mol. Biosyst., 2009, 10, 1039 incorporated herein by reference). UNA is unlocked nucleic acid, typically where the bond between C2 and C3 of the ribose has been removed, forming an unlocked “sugar” residue. The modified nucleosides used in such gapmers may be nucleosides which adopt a 2′ endo (DNA like) structure when introduced into the gap region, i.e. modifications which allow for RNaseH recruitment). In some embodiments the DNA Gap region (G) described herein may optionally contain 1 to 3 sugar modified nucleosides which adopt a 2′ endo (DNA like) structure when introduced into the gap region.

[0157] Alternatively, there are numerous reports of the insertion of a modified nucleoside which confers a 3′ endo conformation into the gap region of gapmers, whilst retaining some RNaseH activity. Such gapmers with a gap region comprising one or more 3′endo modified nucleosides are referred to as “gap-breaker” or “gap-disrupted” gapmers, see for example WO2013/022984.

[0158] As used herein, the term “gap-breaker” or “gap-disrupted” refers to oligonucleotides that retain sufficient region of DNA nucleosides within the gap region to allow for RNaseH recruitment. The ability of “gap-breaker” oligonucleotide design to recruit RNaseH is typically sequence or even compound specific—see Rukov et al. 2015 Nucl. Acids Res. Vol. 43 pp. 8476-8487, which discloses “gap-breaker” oligonucleotides which recruit RNaseH which in some instances provide a more specific cleavage of the target RNA. Modified nucleosides used within the gap region of gap-breaker oligonucleotides may for example be modified nucleosides which confer a 3′endo confirmation, such 2′-O-methyl (OMe) or 2′-O-MOE (MOE) nucleosides, or beta-D LNA nucleosides (the bridge between C2′ and C4′ of the ribose sugar ring of a nucleoside is in the beta conformation), such as beta-D-oxy LNA or ScET nucleosides.

[0159] As with gapmers containing region G described above, the gap region of “gap-breaker” or “gap-disrupted” gapmers, have a DNA nucleosides at the 5′ end of the gap (adjacent to the 3′ nucleoside of region F), and a DNA nucleoside at the 3′ end of the gap (adjacent to the 5′ nucleoside of region F′). Gapmers which comprise a disrupted gap typically retain a region of at least 3 or 4 contiguous DNA nucleosides at either the 5′ end or 3′ end of the gap region.

[0160] Exemplary designs for gap-breaker oligonucleotides include:

F₁₋₈-[D₃₋₄-E₁-D₃₋₄]-F′₁₋₈

F₁₋₈-[D₁₋₄-E₁-D₃₋₄]-F′₁₋₈

F₁₋₈-[D₃₋₄-E₁-D₁₋₄]-F′₁₋₈

wherein region G is within the brackets [Dₙ-Eᵣ-Dₘ], D is a contiguous sequence of DNA nucleosides, E is a modified nucleoside (the gap-breaker or gap-disrupting nucleoside), and F and F′ are the flanking regions as defined herein, and with the proviso that the overall length of the gapmer regions F-G-F′ is at least 12, such as at least 14 nucleotides in length.

[0161] In some embodiments, region G of a gap disrupted gapmer comprises at least 6 DNA nucleosides, such as 6, 7, 8, 9, 10, 11, 12, 13, 14, 15 or 16 DNA nucleosides. As described above, the DNA nucleosides may be contiguous or may optionally be interspersed with one or more modified nucleosides, with the proviso that the gap region G is capable of mediating RNaseH recruitment.

[0162] As used herein, “region F (flanking region)” of the gapmer refers to a region of nucleosides that is positioned immediately adjacent to the 5′ DNA nucleoside of region G. The 3′ most nucleoside of region F is a sugar modified nucleoside, such as a high affinity sugar modified nucleoside, for example a 2′ substituted nucleoside, such as a MOE nucleoside, or an LNA nucleoside.

[0163] As used herein, “region F′ (flanking region)” of the gapmer refers to a region of nucleosides that is positioned immediately adjacent to the 3′ DNA nucleoside of region G. The 5′ most nucleoside of region F′ is a sugar modified nucleoside, such as a high affinity sugar modified nucleoside, for example a 2′ substituted nucleoside, such as a MOE nucleoside, or an LNA nucleoside.

[0164] Region F is 1-8 contiguous nucleotides in length, such as 2-6, such as 3-4 contiguous nucleotides in length. Advantageously the 5′ most nucleoside of region F is a sugar modified nucleoside. In some embodiments the two 5′ most nucleoside of region F are sugar modified nucleoside. In some embodiments the 5′ most nucleoside of region F is an LNA nucleoside. In some embodiments the two 5′ most nucleoside of region F are LNA nucleosides. In some embodiments the two 5′ most nucleoside of region F are 2′ substituted nucleoside nucleosides, such as two 3′ MOE nucleosides. In some embodiments the 5′ most nucleoside of region F is a 2′ substituted nucleoside, such as a MOE nucleoside.

[0165] Region F′ is 2-8 contiguous nucleotides in length, such as 3-6, such as 4-5 contiguous nucleotides in length. Advantageously, embodiments the 3′ most nucleoside of region F′ is a sugar modified nucleoside. In some embodiments the two 3′ most nucleoside of region F′ are sugar modified nucleoside. In some embodiments the two 3′ most nucleoside of region F′ are LNA nucleosides. In some embodiments the 3′ most nucleoside of region F′ is an LNA nucleoside. In some embodiments the two 3′ most nucleoside of region F′ are 2′ substituted nucleoside nucleosides, such as two 3′ MOE nucleosides. In some embodiments the 3′ most nucleoside of region F′ is a 2′ substituted nucleoside, such as a MOE nucleoside.

[0166] It should be noted that when the length of region F or F′ is one, it is advantageously an LNA nucleoside.

[0167] In some embodiments, region F and F′ independently consists of or comprises a contiguous sequence of sugar modified nucleosides. In some embodiments, the sugar modified nucleosides of region F may be independently selected from 2′-O-alkyl-RNA units, 2′-O-methyl-RNA, 2′-amino-DNA units, 2′-fluoro-DNA units, 2′-alkoxy-RNA, MOE units, LNA units, arabino nucleic acid (ANA) units and 2′-fluoro-ANA units.

[0168] In some embodiments, region F and F′ independently comprises both LNA and a 2′ substituted modified nucleosides (mixed wing design).

[0169] In some embodiments, region F and F′ consists of only one type of sugar modified nucleosides, such as only MOE or only beta-D-oxy LNA or only ScET. Such designs are also termed uniform flanks or uniform gapmer design.

[0170] In some embodiments, all the nucleosides of region F or F′, or F and F′ are LNA nucleosides, such as independently selected from beta-D-oxy LNA, ENA or ScET nucleosides. In some embodiments, all the nucleosides of region F or F′, or F and F′ are 2′ substituted nucleosides, such as OMe or MOE nucleosides. In some embodiments region F consists of 1, 2, 3, 4, 5, 6, 7, or 8 contiguous OMe or MOE nucleosides. In some embodiments only one of the flanking regions can consist of 2′ substituted nucleosides, such as OMe or MOE nucleosides. In some embodiments it is the 5′ (F) flanking region that consists 2′ substituted nucleosides, such as OMe or MOE nucleosides whereas the 3′ (F′) flanking region comprises at least one LNA nucleoside, such as beta-D-oxy LNA nucleosides or cET nucleosides. In some embodiments it is the 3′ (F′) flanking region that consists 2′ substituted nucleosides, such as OMe or MOE nucleosides whereas the 5′ (F) flanking region comprises at least one LNA nucleoside, such as beta-D-oxy LNA nucleosides or cET nucleosides.

[0171] In some embodiments, all the modified nucleosides of region F and F′ are LNA nucleosides, such as independently selected from beta-D-oxy LNA, ENA or ScET nucleosides, wherein region F or F′, or F and F′ may optionally comprise DNA nucleosides (an alternating flank, see definition of these for more details). In some embodiments, all the modified nucleosides of region F and F′ are beta-D-oxy LNA nucleosides, wherein region F or F′, or F and F′ may optionally comprise DNA nucleosides (an alternating flank, see definition of these for more details).

[0172] In some embodiments the 5′ most and the 3′ most nucleosides of region F and F′ are LNA nucleosides, such as beta-D-oxy LNA nucleosides or ScET nucleosides.

[0173] In some embodiments, the internucleoside linkage between region F and region G is a phosphorothioate internucleoside linkage. In some embodiments, the internucleoside linkage between region F′ and region G is a phosphorothioate internucleoside linkage. In some embodiments, the internucleoside linkages between the nucleosides of region F or F′, F and F′ are phosphorothioate internucleoside linkages.

[0174] As used herein, the term “LNA gapmer” refers to a gapmer wherein either one or both of region F and F′ comprises or consists of LNA nucleosides. A beta-D-oxy gapmer is a gapmer wherein either one or both of region F and F′ comprises or consists of beta-D-oxy LNA nucleosides.

[0175] In some embodiments the LNA gapmer is of formula: [LNA]₁₋₅-[region G]-[LNA]₁₋₅, wherein region G is as defined in the Gapmer region G definition.

[0176] As used herein, the term “MOE gapmer” refers to a gapmer wherein regions F and F′ consist of MOE nucleosides. In some embodiments the MOE gapmer is of design [MOE]₁₋₈-[Region G]-[MOE]₁₋₈, such as [MOE]₂₋₇-[Region G]₅₋₁₆-[MOE]₂₋₇, such as [MOE]₃₋₆-[Region G]-[MOE]₃₋₆, wherein region G is as defined in the Gapmer definition. MOE gapmers with a 5-10-5 design (MOE-DNA-MOE) have been widely used in the art.

[0177] As used herein, the term “mixed wing gapmer” refers to an LNA gapmer wherein one or both of region F and F′ comprise a 2′ substituted nucleoside, such as a 2′ substituted nucleoside independently selected from the group consisting of 2′-O-alkyl-RNA units, 2′-O-methyl-RNA, 2′-amino-DNA units, 2′-fluoro-DNA units, 2′-alkoxy-RNA, MOE units, arabino nucleic acid (ANA) units and 2′-fluoro-ANA units, such as a MOE nucleosides. In some embodiments wherein at least one of region F and F′, or both region F and F′ comprise at least one LNA nucleoside, the remaining nucleosides of region F and F′ are independently selected from the group consisting of MOE and LNA. In some embodiments wherein at least one of region F and F′, or both region F and F′ comprise at least two LNA nucleosides, the remaining nucleosides of region F and F′ are independently selected from the group consisting of MOE and LNA. In some mixed wing embodiments, one or both of region F and F′ may further comprise one or more DNA nucleosides.

[0178] Mixed wing gapmer designs are disclosed in WO2008/049085 and WO2012/109395, both of which are hereby incorporated by reference.

[0179] As used herein, the term “Alternating Flank Gapmer” refers to LNA gapmer oligonucleotides where at least one of the flanks (F or F′) comprises DNA in addition to the LNA nucleoside(s). In some embodiments at least one of region F or F′, or both region F and F′, comprise both LNA nucleosides and DNA nucleosides. In such embodiments, the flanking region F or F′, or both F and F′ comprise at least three nucleosides, wherein the 5′ and 3′ most nucleosides of the F and/or F′ region are LNA nucleosides.

[0180] In some embodiments at least one of region F or F′, or both region F and F′, comprise both LNA nucleosides and DNA nucleosides. In such embodiments, the flanking region F or F′, or both F and F′ comprise at least three nucleosides, wherein the 5′ and 3′ most nucleosides of the F or F′ region are LNA nucleosides, and there is at least one DNA nucleoside positioned between the 5′ and 3′ most LNA nucleosides of region F or F′ (or both region F and F′).

[0181] The oligonucleotide of the invention may in some embodiments comprise or consist of the contiguous nucleotide sequence of the oligonucleotide which is complementary to the target nucleic acid, such as the gapmer F-G-F′, and further 5′ and/or 3′ nucleosides. The further 5′ and/or 3′ nucleosides may or may not be fully complementary to the target nucleic acid. Such further 5′ and/or 3′ nucleosides may be referred to as “region D′” and “region D″” herein.

[0182] The addition of “region D′” or “region D″” may be used for the purpose of joining the contiguous nucleotide sequence, such as the gapmer, to a conjugate moiety or another functional group. When used for joining the contiguous nucleotide sequence with a conjugate moiety is can serve as a biocleavable linker. Alternatively it may be used to provide exonuclease protection or for ease of synthesis or manufacture.

[0183] “Region D′” and “Region D″” can be attached to the 5′ end of region F or the 3′ end of region F′, respectively to generate designs of the following formulas D′-F-G-F′, F-G-F′-D″ or D′-F-G-F′-D″. In this instance the F-G-F′ is the gapmer portion of the oligonucleotide and region D′ or D″ constitute a separate part of the oligonucleotide.

[0184] “Region D′” or “Region D″” may independently comprise or consist of 1, 2, 3, 4 or 5 additional nucleotides, which may be complementary or non-complementary to the target nucleic acid. The nucleotide adjacent to the F or F′ region is not a sugar-modified nucleotide, such as a DNA or RNA or base modified versions of these. The D′ or D′ region may serve as a nuclease susceptible biocleavable linker (see definition of linkers). In some embodiments the additional 5′ and/or 3′ end nucleotides are linked with phosphodiester linkages, and are DNA or RNA. Nucleotide based biocleavable linkers suitable for use as region D′ or D″ are disclosed in WO2014/076195, which include by way of example a phosphodiester linked DNA dinucleotide. The use of biocleavable linkers in poly-oligonucleotide constructs is disclosed in WO2015/113922, where they are used to link multiple antisense constructs (e.g. gapmer regions) within a single oligonucleotide.

[0185] In one embodiment the oligonucleotide of the invention comprises a region D′ and/or D″ in addition to the contiguous nucleotide sequence which constitutes the gapmer.

[0186] In some embodiments, the oligonucleotide of the present invention can be represented by the following formulae:

F-G-F′; in particular F₁₋₈-G₅₋₁₆-F′₂₋₈

D′-F-G-F′, in particular D′₁₋₃-F₁₋₈-G₅₋₁₆-F′₂₋₈

F-G-F′-D″, in particular F₁₋₈-G₅₋₁₆-F′₂₋₈-D″₁₋₃

D′-F-G-F′-D″, in particular D′₁₋₃-F₁₋₈-G₅₋₁₆-F′₂₋₈-D″₁₋₃

[0187] In some embodiments the internucleoside linkage positioned between region D′ and region F is a phosphodiester linkage. In some embodiments the internucleoside linkage positioned between region F′ and region D″ is a phosphodiester linkage.

[0188] As used herein, the term “conjugate” refers to an oligonucleotide which is covalently linked to a non-nucleotide moiety (conjugate moiety or region C or third region).

[0189] Conjugation of the oligonucleotide of the invention to one or more non-nucleotide moieties may improve the pharmacology of the oligonucleotide, e.g. by affecting the activity, cellular distribution, cellular uptake or stability of the oligonucleotide. In some embodiments the conjugate moiety modify or enhance the pharmacokinetic properties of the oligonucleotide by improving cellular distribution, bioavailability, metabolism, excretion, permeability, and/or cellular uptake of the oligonucleotide. In particular the conjugate may target the oligonucleotide to a specific organ, tissue or cell type and thereby enhance the effectiveness of the oligonucleotide in that organ, tissue or cell type. At the same time the conjugate may serve to reduce activity of the oligonucleotide in non-target cell types, tissues or organs, e.g. off target activity or activity in non-target cell types, tissues or organs.

[0190] In an embodiment, the non-nucleotide moiety (conjugate moiety) is selected from the group consisting of carbohydrates, cell surface receptor ligands, drug substances, hormones, lipophilic substances, polymers, proteins, peptides, toxins (e.g. bacterial toxins), vitamins, viral proteins (e.g. capsids) or combinations thereof.

[0191] As used herein, the term “linkage” or “linker” refers to a connection between two atoms that links one chemical group or segment of interest to another chemical group or segment of interest via one or more covalent bonds. Conjugate moieties can be attached to the oligonucleotide directly or through a linking moiety (e.g. linker or tether). Linkers serve to covalently connect a third region, e.g. a conjugate moiety (Region C), to a first region, e.g. an oligonucleotide or contiguous nucleotide sequence or gapmer region F-G-F′ (region A).

[0192] In some embodiments of the invention the conjugate or oligonucleotide conjugate of the invention may optionally, comprise a linker region (second region or region B and/or region Y) which is positioned between the oligonucleotide or contiguous nucleotide sequence complementary to the target nucleic acid (region A or first region) and the conjugate moiety (region C or third region).

[0193] As used herein, the term “Region B” refers to biocleavable linkers comprising or consisting of a physiologically labile bond that is cleavable under conditions normally encountered or analogous to those encountered within a mammalian body. Conditions under which physiologically labile linkers undergo chemical transformation (e.g., cleavage) include chemical conditions such as pH, temperature, oxidative or reductive conditions or agents, and salt concentration found in or analogous to those encountered in mammalian cells. Mammalian intracellular conditions also include the presence of enzymatic activity normally present in a mammalian cell such as from proteolytic enzymes or hydrolytic enzymes or nucleases. In one embodiment the biocleavable linker is susceptible to Si nuclease cleavage. DNA phosphodiester containing biocleavable linkers are described in more detail in WO 2014/076195 (hereby incorporated by reference)—see also region D′ or D″ herein.

[0194] As used herein, the term “Region Y” refers to linkers that are not necessarily biocleavable but primarily serve to covalently connect a conjugate moiety (region C or third region), to an oligonucleotide (region A or first region). The region Y linkers may comprise a chain structure or an oligomer of repeating units such as ethylene glycol, amino acid units or amino alkyl groups. The oligonucleotide conjugates of the present invention can be constructed of the following regional elements A-C, A-B-C, A-B-Y-C, A-Y-B-C or A-Y-C. In some embodiments the linker (region Y) is an amino alkyl, such as a C2 to C36 amino alkyl group, including, for example C6 to Cu amino alkyl groups. In a preferred embodiment the linker (region Y) is a C6 amino alkyl group.

### II. Oligonucleotides for Inhibiting ATXN3

[0195] The invention relates to oligonucleotides, such as antisense oligonucleotides, targeting ATXN3 expression.

[0196] The oligonucleotides of the invention targeting ATXN3 are capable of hybridizing to and inhibiting the expression of a ATXN3 target nucleic acid in a cell which is expressing the ATXN3 target nucleic acid.

[0197] The ATXN3 target nucleic acid may be a mammalian ATXN3 mRNA or premRNA, such as a human, mouse or monkey ATXN3 mRNA or premRNA. In some embodiments, the ATXN3 target nucleic acid is ATXN3 mRNA or premRNA for example a premRNA or mRNA originating from the Homo sapiens Ataxin 3 (ATXN3), RefSeqGene on chromosome 14, exemplified by NCBI Reference Sequence NM_004993.5 (SEQ ID NO:1).

[0198] The human ATXN3 pre-mRNA is encoded on Homo sapiens Chromosome 14, NC_000014.9 (92058552..92106621, complement). GENE ID=4287 (ATX3).

[0199] The oligonucleotides of the invention are capable of inhibiting the expression of ATXN3 target nucleic acid, such as the ATXN3 mRNA, in a cell which is expressing the target nucleic acid, such as the ATXN3 mRNA (e.g. a human, monkey or mouse cell).

[0200] In some embodiments, the oligonucleotides of the invention are capable of inhibiting the expression of ATXN3 target nucleic acid in a cell which is expressing the target nucleic acid, so to reduce the level of ATXN3 target nucleic acid (e.g. the mRNA) by at least 50%, at least 60%, at least 70%, at least 80%, or at least 90% inhibition compared to the expression level of the ATXN3 target nucleic acid (e.g. the mRNA) in the cell. Suitably the cell is selected from the group consisting of a human cell, a monkey cell and a mouse cell. In some embodiments, the cell is a SK—N-AS, A431, NCI-H23 or ARPE19 cell (for more information on these cells, see Examples). Example 1 provides a suitable assay for evaluating the ability of the oligonucleotides of the invention to inhibit the expression of the target nucleic acid. Suitably the evaluation of a compounds ability to inhibit the expression of the target nucleic acid is performed in vitro, such a gymnotic in vitro assay, for example as according to Example 1.

[0201] In some embodiments, an oligonucleotide of the invention is more capable in inhibiting the expression of ATXN3 target nucleic acid in a cell which is expressing the target nucleic acid than in inhibiting the expression of KCNB2 nucleic acid in a cell which is expressing the KCNB2 nucleic acid, providing for a higher selectivity in targeting the ATXN3 target nucleic acid. KCNB2 (Potassium Voltage-Gated Channel Subfamily B Member 2) nucleic acid was identified as containing a potential off-target sequence which may be annealed to certain oligonucleotides targeting SEQ ID NO:1098 and/or SEQ ID NO:1992. Information, including sequence information, about the KCNB2 gene and transcripts can be found in the public database Ensembl (release 101) at gene id ENSG00000182674.

[0202] Suitably, the capability of an oligonucleotide to inhibit the expression of ATXN3 and KCNB2 nucleic acids is tested in a cell expressing both nucleic acids. In some embodiments, an oligonucleotide of the invention is capable of inhibiting the expression of ATXN3 target nucleic acid so as to reduce the level of ATXN3 target nucleic acid (e.g. the mRNA) by a fraction which is at least 50%, at least 60%, at least 70%, at least 80%, or at least 90% inhibition compared to the expression level of the ATXN3 target nucleic acid (e.g. the mRNA) in the cell, but reduces the level of KCNB2 off-target nucleic acid (e.g., the mRNA) as compared to the expression level of the KCNB2 target nucleic acid (e.g. the mRNA) in the cell by a smaller fraction. The cell, may, for example, be selected from the group consisting of a human cell, a monkey cell and a mouse cell. In some embodiments, the cell is a neuronal cell, such as an iCell® Glutaneuron cell (for more information on these cells, see Table 2). Examples 5 and 14 provides suitable assays for evaluating the ability of the oligonucleotides of the invention to inhibit the expression of the target nucleic acid as compared to the off-target nucleic acid. Suitably the evaluation of the ability of an oligonucleotide to inhibit the expression of the target nucleic acid and the off-target nucleic acid is performed in vitro, such a gymnotic in vitro assay, for example as according to Example 14.

[0203] Advantageously, an oligonucleotide according to the invention has a low EC50 in inhibiting the expression of ATXN3 target nucleic acid in a cell which is expressing the target nucleic acid, providing for a high efficacy and/or potency in targeting the ATXN3 target nucleic acid. In some embodiments, the EC50 for inhibiting the expression of ATXN3 target nucleic acid is no more than about 1 μM, such as no more than about 500 nM, such as no more than about 300 nM, such as no more than about 200 nM, such as no more than about 180 nM, such as no more than about 170 nM, such as no more than about 160 nM, such as no more than about 150 nM, such as no more than about 140 nM, such as no more than about 130 nM, such as no more than about 120 nM, such as no more than about 110 nM, such as no more than about 100 nM, such as no more than about 90 nM, such as no more than about 80 nM, such as no more than about 70 nM, such as no more than about 60 nM, such as no more than about 50 nM. The cell, may, for example, be selected from the group consisting of a human cell, a monkey cell and a mouse cell. In some embodiments, the cell is a neuronal cell, such as a human neuronal cell, such as an iCell® GlutaNeuron cell (for more information on these cells, see Table 2). A particularly suitable assay is described in Example 16.

[0204] Preferably, an oligonucleotide according to the invention also or alternatively has a lower EC50 for inhibiting the expression of ATXN3 target nucleic acid (e.g., mRNA) in a cell than for inhibiting the expression of KCNB2 off-target nucleic acid (e.g., mRNA) in the cell, indicating that 50% inhibition of the expression of the nucleic acid is, for ATXN3 target nucleic acid, achieved at a lower oligonucleotide concentration, thereby providing for a higher selectivity. In some embodiments, the ratio between the EC50 for inhibiting the expression of KCNB2 off-target nucleic acid (e.g., mRNA) and the EC50 for inhibiting the expression of ATXN3 target nucleic acid is at least about 2, such as at least about 2.1, such as at least about 2.2, such as at least about 2.5, such as at least about 3, such as at least about 4, such as at least about 5, such as at least about 6, such as at least about 7, such as at least about 8, such as at least about 9, such as at least about 10, such as at least about 12, such as at least about 15, such as at least about 20, such as at least about 50, such as at least about 100, such as at least about 200, such as at least about 400, such as at least about 600, such as at least about 1000. The cell, may, for example, be selected from the group consisting of a human cell, a monkey cell and a mouse cell. In some embodiments, the cell is a neuronal cell, such as a human neuronal cell, such as an iCell® GlutaNeuron cell (for more information on these cells, see Table 2). Particularly suitable assays are described in Examples 14 and 16.

[0205] Typically, an oligonucleotide according to the invention also or alternatively has a low toxicity. Suitably, this can be tested in an in vitro assay, such as, e.g., in any one or more of the assays described in Example 7.

[0206] An aspect of the present invention relates to an antisense oligonucleotide, such as an LNA antisense oligonucleotide gapmer which comprises a contiguous nucleotide sequence of 10 to 30 nucleotides in length with at least 90% complementarity, such as is fully complementary to SEQ ID NO:1, 2 or 3.

[0207] In some embodiments, the oligonucleotide comprises a contiguous sequence of 10-30 nucleotides, which is at least 90% complementary, such as at least 91%, such as at least 92%, such as at least 93%, such as at least 94%, such as at least 95%, such as at least 96%, such as at least 97%, such as at least 98%, or 100% complementary with a region of the target nucleic acid or a target sequence. The sequences of suitable target nucleic acids are described herein above.

[0208] In some embodiments, the oligonucleotide of the invention comprises a contiguous nucleotides sequence of 12-24, such as 13, 14, 15, 16, 17, 18, 19, 20, 21, 22, or 23, contiguous nucleotides in length, wherein the contiguous nucleotide sequence is fully complementary to a target nucleic acid having a sequence as provided in the section “Taget sequence regions” above.

[0209] In some embodiments, the antisense oligonucleotide of the invention comprises a contiguous nucleotides sequence of 12-15, such as 13, or 14, 15 contiguous nucleotides in length, wherein the contiguous nucleotide sequence is fully complementary to a target nucleic acid having a sequence as provided in the section “Target sequence regions” above.

[0210] Typically, the antisense oligonucleotide of the invention or the contiguous nucleotide sequence thereof is a gapmer, such as an LNA gapmer, a mixed wing gapmer, or an alternating flank gapmer.

[0211] In some embodiments, the antisense oligonucleotide according to the invention, comprises a contiguous nucleotide sequence of at least 10 contiguous nucleotides, such as at least 12 contiguous nucleotides, such as at least 13 contiguous nucleotides, such as at least 14 contiguous nucleotides, such as at least 15 contiguous nucleotides, which is fully complementary to a target sequence comprised in a sequence selected from SEQ ID NO:1098, SEQ ID NO:1992, or both.

[0212] In some embodiments, the target sequence region of an antisense oligonucleotide according to the invention comprises or consists of SEQ ID NO:1098.

[0213] In some embodiments, the target sequence region of an antisense oligonucleotide according to the invention comprises or consists of SEQ ID NO:1992.

[0214] In some embodiments the contiguous nucleotide sequence of the antisense oligonucleotide according to the invention is less than 20 nucleotides in length. In some embodiments the contiguous nucleotide sequence of the antisense oligonucleotide according to the invention is 12-24 nucleotides in length. In some embodiments the contiguous nucleotide sequence of the antisense oligonucleotide according to the invention is 12-22 nucleotides in length. In some embodiments the contiguous nucleotide sequence of the antisense oligonucleotide according to the invention is 12-20 nucleotides in length. In some embodiments the contiguous nucleotide sequence of the antisense oligonucleotide according to the invention is 12-18 nucleotides in length. In some embodiments the contiguous nucleotide sequence of the antisense oligonucleotide according to the invention is 12-16 nucleotides in length.

[0215] Advantageously, in some embodiments all of the internucleoside linkages between the nucleosides of the contiguous nucleotide sequence are phosphorothioate internucleoside linkages.

[0216] In some embodiments, the contiguous nucleotide sequence is fully complementary to a target nucleic acid.

[0217] The oligonucleotide compounds represent specific designs of a motif sequence.

[0218] Typically, capital letters or the HELM-designation [LR] represent beta-D-oxy LNA nucleosides, lowercase letters or [dR] represent DNA nucleosides, all LNA C are 5-methyl cytosine, and 5-methyl DNA cytosines are presented by “e” or ^{m}c or [5meC], and all internucleoside linkages are, unless otherwise indicated, stereoundefined phosphorothioate internucleoside linkages [sP].

[0219] Design refers to the gapmer design, F-G-F′, where each number represents the number of consecutive modified nucleosides, e.g. 2′ modified nucleosides (first number=5′ flank), followed by the number of DNA nucleosides (second number=gap region), followed by the number of modified nucleosides, e.g. 2′ modified nucleosides (third number=3′ flank), optionally preceded by or followed by further repeated regions of DNA and LNA, which are not necessarily part of the contiguous nucleotide sequence that is complementary to the target nucleic acid.

[0220] Motif sequences represent the contiguous sequence of nucleobases present in the oligonucleotide, also referred to as the Oligonucleotide Base Sequence.

[0221] Typically, the antisense oligonucleotides is 12-24, such as 12-18, nucleosides in length wherein the antisense oligonucleotide comprises a contiguous nucleotide sequence comprising at least 12, such as at least 14, such as at least 15 contiguous nucleotides present in a sequence selected from SEQ ID NO:1122 and SEQ ID NO:1816, with one or more of the further modifications described herein.

[0222] In some embodiments, the antisense oligonucleotide is a gapmer oligonucleotide comprising a contiguous nucleotide sequence of formula 5′-F-G-F′-3′, where region F and F′ independently comprise 1-8 sugar modified nucleosides, and G is a region between 5 and 16 nucleosides which are capable of recruiting RNaseH.

[0223] In some embodiments, the sugar-modified nucleosides of region F and F′ are independently selected from the group consisting of 2′-O-alkyl-RNA, 2′-O-methyl-RNA, 2′-O-alkoxy-RNA, 2′-O-methoxyethyl-RNA, 2′-amino-DNA, 2′-fluoro-DNA, arabino nucleic acid (ANA), 2′-fluoro-ANA and LNA nucleosides.

[0224] In some embodiments, region G comprises 5-16 contiguous DNA nucleosides.

[0225] In some embodiments, the antisense oligonucleotide is an LNA gapmer oligonucleotide comprising LNA nucleosides.

[0226] In some embodiments, the LNA nucleosides are beta-D-oxy LNA nucleosides.

[0227] In some embodiments, substantially all, or all of the internucleoside linkages between the contiguous nucleosides are phosphorothioate internucleoside linkages.

[0228] In some embodiments, substantially all, or all phosphorothioate internucleoside linkages between the contiguous nucleosides are stereo-undefined phosphorothioate internucleoside linkages.

[0229] In some embodiments, one or more internucleoside linkages between the contiguous nucleosides are stereodefined phosphorothioate internucleoside linkages.

[0230] In some embodiments, one or more internucleoside linkages between the contiguous nucleosides are MOPS linkages.

[0231] In some embodiments, one or more internucleoside linkages between the contiguous nucleosides are MOPO linkages.

[0232] Particular sequence motifs and antisense oligonucleotides of the present invention are shown in Table 11 of Example 13, wherein each compound represents a separate specific embodiment according to the invention.

[0233] In some embodiments, the antisense oligonucleotide comprises a contiguous nucleotide sequence comprising the base sequence of an antisense oligonucleotide selected from the group consisting of Compound ID Nos. 1122_82 to 1122_406, shown in Table 11.

[0234] In some embodiments, the antisense oligonucleotide comprises or consists of an antisense oligonucleotide selected from the group consisting of Compound ID Nos. 1122_82 to 1122_406, shown in Table 11.

[0235] In some embodiments, the antisense oligonucleotide comprises a contiguous nucleotide sequence comprising the nucleoside base sequence and, optionally, the sugar moiety modifications, of an antisense oligonucleotide selected from the group consisting of Compound ID Nos. 1122_91, 1122_107, 1122_54, 1122_155, 1122_156, 1122_157, 1122_158, 1122_167, 1122_172, 1122_175, 1122_294, 1122_296, 1122_359, 1122_384 and 1122_385, shown in Table 14.

[0236] In one aspect, the antisense oligonucleotide is an LNA gapmer antisense oligonucleotide comprising a contiguous nucleotide sequence comprising the contiguous nucleotides present in SEQ ID NO:1122 except for the modified nucleosides and modified internucleoside linkages indicated in Table 15 for each residue in SEQ ID NO: 1122. In a specific embodiment, the antisense oligonucleotide is more capable of inhibiting the expression of human ATXN3 than human KCNB2 in a cell which is expressing human ATXN3 and human KCNB2.

[0237] In one embodiment, the LNA gapmer antisense oligonucleotide comprises the contiguous nucleotides present in SEQ ID NO:1122, wherein all internucleoside linkages are stereo-undefined phosphorothioate internucleoside linkages, wherein 2, 3 or 4 of the nucleosides in each of region F and region F′ are beta-D-oxy LNA nucleosides [LR], typically wherein each beta-D-oxy LNA cytosine is 5-methyl cytosine [LR](5meC), except for:
[0238] (a) residue 10 being a 2′-O-methyl uracil nucleoside [mR](U) (e.g., Compound ID No. 1122_91);
[0239] (b) residue 3 being a 2′-O-methyl uracil nucleoside [mR](U) (e.g., Compound ID No. 1122_107);
[0240] (c) the internucleoside linkage between residues 11 and 12 being a stereodefined phosphorothioate internucleoside linkage [ssP] (e.g., Compound ID No. 1122_154);
[0241] (d) the internucleoside linkage between residues 12 and 13 being a stereodefined phosphorothioate internucleoside linkage [ssP] (e.g., Compound ID No. 1122_155);
[0242] (e) the internucleoside linkage between residues 13 and 14 being a stereodefined phosphorothioate internucleoside linkage [ssP] (e.g., Compound ID No. 1122_156);
[0243] (f) the internucleoside linkage between residues 14 and 15 being a stereodefined phosphorothioate internucleoside linkage [ssP] (e.g., Compound ID No. 1122_157);
[0244] (g) the internucleoside linkage between residues 15 and 16 being a stereodefined phosphorothioate internucleoside linkage [ssP] (e.g., Compound ID No. 1122_158);
[0245] (h) residue 7 being a 2′-O-methoxyethyl adenine nucleoside [MOE](A) (e.g., Compound ID No. 1122_167);
[0246] (i) residue 15 being a 2′-O-methyl cytosine nucleoside [mR](C) (e.g., Compound ID NO. 1122_172);
[0247] (j) residue 11 being a 2′-O-methyl adenine nucleoside [mR](A) (e.g., Compound ID No. 1122_175);
[0248] (k) residue 18 being a 2′-fluoro cytosine nucleoside [fR](C) (e.g., Compound ID No. 1122_294);
[0249] (l) residue 4 being a 2′-O-methyl cytosine nucleoside [mR](C) (e.g., Compound ID No. 1122_296);
[0250] (m) the internucleoside linkage between residues 15 and 16 being a 3-methoxypropyiphosphonothioate internucleoside linkage [MOPS] (e.g., Compound ID No. 1122_359);
[0251] (n) the internucleoside linkage between residues 16 and 17 being a 3-methoxypropylphosphoriothioate internucleoside linkage [MOPS] (e.g., Compound ID No. 1122_384);
[0252] (o) the internucleoside linkage between residues 6 and 7 being a 3-methoxypropylphosphonothioate internucleoside linkage [MOPS] (e.g., Compound ID No. 1122_385); or
[0253] (p) a combination of any two or more of (a) to (o).

[0254] In some embodiments, the one or more modified nucleosides and/or one or more modified internucleoside linkages are, for each residue in SEQ ID NO:1122, independently selected from the options for that residue as shown in Table 15.

[0255] In one aspect, the antisense oligonucleotide is an LNA gapmer antisense oligonucleotide comprising a contiguous nucleotide sequence comprising the contiguous nucleotides present in SEQ ID NO:1816 except for the modified nucleosides and modified internucleoside linkages indicated in Table 16 for each residue in SEQ ID NO:1816. In a specific embodiment, the antisense oligonucleotide is more capable of inhibiting the expression of human ATXN3 than human KCNB2 in a cell which is expressing human ATXN3 and human KCNB2.

[0256] In one embodiment, the LNA gapmer antisense oligonucleotide comprises the contiguous nucleotides present in SEQ ID NO:1816, wherein all internucleoside linkages are stereo-undefined phosphorothioate internucleoside linkages, wherein 4, 5 or 6 of the nucleosides in the F-region and 2 or 3 of the nucleosides in the F′-region are beta-D-oxy LNA nucleosides [LR], typically wherein each beta-D-oxy LNA cytosine is 5-methyl cytosine [LR](5meC), except for:
[0257] (a) the internucleoside linkage between residues 12 and 13 being a stereodefined phosphorothioate internucleoside linkage [ssP] (e.g., Compound ID No. 1816_13);
[0258] (b) the internucleoside linkage between residues 14 and 15 being a stereodefined phosphorothioate internucleoside linkage [ssP] (e.g., Compound ID No. 1816_15);
[0259] (c) residue 8 being a 2′-fluoro adenine nucleoside [fR](A) (e.g., Compound ID No. 1816_28);
[0260] (d) residues 1, 2, 3, 5, 7, 8, 16, 17 and 18 being LNA beta-D-oxy LNA nucleosides [LR], wherein each beta-D-oxy LNA cytosine is 5-methyl cytosine [LR](5meC) (e.g, Compound ID No. 181641);
[0261] (e) residue 17 being a 2′-O-methoxyethyl thymine nucleoside [MOE](T) (e.g., Compound ID No. 1816_42);
[0262] (f) residue 16 being a 2′-O-methoxyethyl cytosine nucleoside [MOE](5meC) (e.g., Compound ID No. 1816_43);
[0263] (g) residue 8 being a 2′-O-methyl adenine nucleoside [mR](A) (e.g., Compound ID No. 1816_60);
[0264] (h) residue 3 being a 2′-O-methyl adenine nucleoside [mR](A) (e.g., Compound ID No. 1816_61);
[0265] (i) residue 16 being a 2′-O-fluoro cytosine nucleoside [fR](C) (e.g., Compound ID No. 1816_64);
[0266] (j) residue 16 being a 2′-O-methyl cytosine nucleoside [mR](C) (e.g., Compound ID No. 1816_65);
[0267] (k) residue 17 being a 2′-fluoro uracil nucleoside [fR](U) (e.g., Compound ID No. 1816_68);
[0268] (l) the internucleoside linkage between residues 16 and 17 being a 3-methoxypropylphosphonothioate internucleoside linkage [MOPS] (e.g., Compound ID No. 1816_92); or
[0269] (m) a combination of any two or more of (a) to (1).

[0270] In some embodiments, the one or more modified nucleosides and/or one or more modified internucleoside linkages are, for each residue in SEQ ID NO:1816, independently selected from the options for that residue as shown in Table 16.

[0271] In some embodiments, the antisense oligonucleotide comprises or consists of Compound ID No. 1122_91, as shown in Table 11.

[0272] In some embodiments, the antisense oligonucleotide comprises or consists of Compound ID No. 1122_107, as shown in Table 11.

[0273] In some embodiments, the antisense oligonucleotide comprises or consists of Compound ID No. 1122_154, as shown in Table 11.

[0274] In some embodiments, the antisense oligonucleotide comprises or consists of Compound ID No. 1122_155, as shown in Table 11.

[0275] In some embodiments, the antisense oligonucleotide comprises or consists of Compound ID No. 1122_156, as shown in Table 11.

[0276] In some embodiments, the antisense oligonucleotide comprises or consists of Compound ID No. 1122_157, as shown in Table 11.

[0277] In some embodiments, the antisense oligonucleotide comprises or consists of Compound ID No. 1122_158, as shown in Table 11.

[0278] In some embodiments, the antisense oligonucleotide comprises or consists of Compound ID No. 1122_167, as shown in Table 11.

[0279] In some embodiments, the antisense oligonucleotide comprises or consists of Compound ID No. 1122_172, as shown in Table 11.

[0280] In some embodiments, the antisense oligonucleotide comprises or consists of Compound ID No. 1122_175, as shown in Table 11.

[0281] In some embodiments, the antisense oligonucleotide comprises or consists of Compound ID No. 1122_294, as shown in Table 11.

[0282] In some embodiments, the antisense oligonucleotide comprises or consists of Compound ID No. 1122_296, as shown in Table 11.

[0283] In some embodiments, the antisense oligonucleotide comprises or consists of Compound ID No. 1122_359, as shown in Table 11.

[0284] In some embodiments, the antisense oligonucleotide comprises or consists of Compound ID No. 1122_384, as shown in Table 11.

[0285] In some embodiments, the antisense oligonucleotide comprises or consists of Compound ID No. 1122_385, as shown in Table 11.

[0286] In some embodiments, the antisense oligonucleotide comprises or consists of Compound ID No. 1816_13, as shown in Table 11.

[0287] In some embodiments, the antisense oligonucleotide comprises or consists of Compound ID No. 1816_15, as shown in Table 11.

[0288] In some embodiments, the antisense oligonucleotide comprises or consists of Compound ID No. 1816_28, as shown in Table 11.

[0289] In some embodiments, the antisense oligonucleotide comprises or consists of Compound ID No. 1816_41, as shown in Table 11.

[0290] In some embodiments, the antisense oligonucleotide comprises or consists of Compound ID No. 1816_42, as shown in Table 11.

[0291] In some embodiments, the antisense oligonucleotide comprises or consists of Compound ID No. 1816_43, as shown in Table 11.

[0292] In some embodiments, the antisense oligonucleotide comprises or consists of Compound ID No. 1816_60, as shown in Table 11.

[0293] In some embodiments, the antisense oligonucleotide comprises or consists of Compound ID No. 1816_61, as shown in Table 11.

[0294] In some embodiments, the antisense oligonucleotide comprises or consists of Compound ID No. 1816_64, as shown in Table 11.

[0295] In some embodiments, the antisense oligonucleotide comprises or consists of Compound ID No. 1816_65, as shown in Table 11.

[0296] In some embodiments, the antisense oligonucleotide comprises or consists of Compound ID No. 1816_68, as shown in Table 11.

[0297] In some embodiments, the antisense oligonucleotide comprises or consists of Compound ID No. 1816_92, as shown in Table 11.

[0298] In some embodiments, the antisense oligonucleotide is an antisense oligonucleotide according to the following chemical annotation:
[0299] (a) ^{[LR]}A_{[sP]}.^{[dR]}A_{[sP]}.^{[dR]}T_{[sP]}.^{[LR][5me]}C_{[sP]}.^{[dR]}T_{[sP]}.^{[LR]}T_{[sP]}.^{[dR]}A_{[sP]}.^{[dR]}T_{[sP]}.^{[dR]}T_{[sP]}.^{[m R]}U_{[sP]}.^{[dR]}(A)_{[sP]}.^{[dR]}C_{[sP]}.^{[dR]}A_{[sP]}.^{[dR]}T_{[sP]}.^{[dR]}C_{[sP]}.^{[dR]}T_{[sP]}.^{[LR]}T_{[sP]}.^{[LR][5me]}C)_{[sP]}.^{[LR][5me]}C (SEQ ID NO:1122, wherein residue 10 is U) (Compound ID No. 1122_91);
[0300] (b) ^{[LR]}A_{[sP]}.^{[LR]}A_{[sP]}.^{[mR]}U_{[sP]}.^{[LR][5me]}C_{[sP]}.^{[dR]}T_{[sP]}.^{[dR]}T_{[sP]}.^{[dR]}A_{[sP]}.^{[dR]}T_{[sP]}.^{[dR]}T_{[sP]}.^{[d R]}T_{[sP]}.^{[dR]}A_{[sP]}.^{[dR]}C_{[sP]}.^{[dR]}A_{[sP]}.^{[dR]}T_{[sP]}.^{[dR]}C_{[sP]}.^{[LR]}T_{[sP]}.^{[dR]}T_{[sP]}.^{[LR][5me]}C_{[sP]}.^{[LR][5me]}C (SEQ ID NO:1122, wherein residue 3 is U) (Compound ID No. 1122_107);
[0301] (c) ^{[LR]}A_{[sP]}.^{[dR]}A_{[sP]}.^{[dR]}T_{[sP]}.^{[LR][5me]}C_{[sP]}.^{[dR]}T_{[sP]}.^{[LR]}T_{[sP]}.^{[dR]}A_{[sP]}.^{[dR]}T_{[sP]}.^{[dR]}T_{[sP]}.^{[d R]}T_{[sP]}.^{[dR]}A_{[sP]}.^{[dR]}C_{[sP]}.^{[dR]}A_{[sP]}.^{[dR]}T_{[sP]}.^{[dR]}C_{[sP]}.^{[dR]}T_{[sP]}.^{[LR]}T_{[sP]}.^{[LR][5me]}C_{[sP]}.^{[LR][5me]}C (SEQ ID NO:1122) (Compound ID No. 1122_154);
[0302] (d) ^{[LR]}A_{[sP]}.^{[dR]}A_{[sP]}.^{[dR]}T_{[sP]}.^{[LR][5me]}C_{[sP]}.^{[dr]}T_{[sP]}.^{[LR]}T_{[sP]}.^{[dR]}A_{[sP]}.^{[dR]}T_{[sP]}.^{[dR]}T_{[sP]}.^{[d R]}T_{[sP]}.^{[dR]}A_{[sP]}.^{[dR]}C_{[sP]}.^{[dR]}A_{[sP]}.^{[dR]}T_{[sP]}.^{[dR]}C_{[sP]}.^{[dR]}T_{[sP]}.^{[dR]}T_{[sP]}.^{[LR][5me]}C_{[sP]}.^{[LR][5me]}C (SEQ ID NO:1122) (Compound ID No. 1122_155);
[0303] (e) ^{[LR]}A_{[sP]}.^{[dR]}A_{[sP]}.^{[dR]}T_{[sP]}.^{[LR]}[5meC]_{[sP]}.^{[dR]}T_{[sP]}.^{[LR]}T_{[sP]}.^{[dR]}A_{[sP]}.^{[dR]}T_{[sP]}.^{[dR]}T_{[sP]}.^{[dR]}T_{[sP]}.^{[dR]}A_{[sP]}.^{[dR]}C_{[sP]}.^{[dR]}A_{[sP]}.^{[dR]}T_{[sP]}.^{[dR]}C_{[sP]}.^{[dR]}T_{[sP]}.^{[LR]}T_{[sP]}.^{[LR][5me]}C_{[sP]}.^{[L R][5me]}C (SEQ ID NO:1122) (Compound ID No. 1122_156);
[0304] (f) ^{[LR]}A_{[sP]}.^{[dR]}A_{[sP]}.^{[dR]}T_{[sP]}.^{[LR]}[5meC]_{[sP]}.^{[dR]}T_{[sP]}.^{[LR]}T_{[sP]}.^{[dR]}A_{[sP]}.^{[dR]}T_{[sP]}.^{[dR]}T_{[sP]}.^{[dR]}T_{[sP]}.^{[dR]}A_{[sP]}.^{[dR]}C_{[sP]}.^{[dR]}A_{[sP]}.^{[dR]}T_{[sP]}.^{[dR]}C_{[sP]}.^{[dR]}T_{[sP]}.^{[LR]}T_{[sP]}.^{[LR][5me]}C_{[sP]}.^{[L R][5me]}C (SEQ ID NO:1122) (Compound ID No. 1122_157);
[0305] (g) ^{[LR]}A_{[sP]}.^{[dR]}A_{[sP]}.^{[dR]}T_{[sP]}.^{[LR][5me]}C_{[sP]}.^{[dR]}T_{[sP]}.^{[LR]}T_{[sP]}.^{[dR]}A_{[sP]}.^{[dR]}T_{[sP]}.^{[dR]}T_{[sP]}.^{[d R]}T_{[sP]}.^{[dR]}A_{[sP]}.^{[dR]}C_{[sP]}.^{[dR]}A_{[sP]}.^{[dR]}T_{[sP]}.^{[dR]}C_{[sP]}.^{[dR]}T_{[sP]}.^{[LR]}T_{[sP]}.^{[LR][5me]}C_{[sP]}.^{[LR][5me]}C (SEQ ID NO:1122) (Compound ID No. 1122_158);
[0306] (h) ^{[LR]}A_{[sP]}.^{[dR]}A_{[sP]}.^{[dR]}T_{[sP]}.^{[LR][5me]}C_{[sP]}.^{[dR]}T_{[sP]}.^{[LR]}T_{[sP]}.^{[MOE]}A_{[sP]}.^{[dR]}T_{[sP]}.^{[dR]}T_{[sP]}.^{[dR]}T_{[sP]}.^{[dR]}A_{[sP]}.^{[dR]}C_{[sP]}.^{[dR]}A_{[sP]}.^{[dR]}T_{[sP]}.^{[dR]}C_{[sP]}.^{[dR]}T_{[sP]}.^{[LR]}T_{[sP]}.^{[LR][5me]}C_{[sP]}.^{[LR][5me]}C (SEQ ID NO:1122) (Compound ID No. 1122_167);
[0307] (i) ^{[LR]}A_{[sP]}.^{[dR]}A_{[sP]}.^{[dR]}T_{[sP]}.^{[LR]}[5meC]_{[sP]}.^{[dR]}T_{[sP]}.^{[LR]}T_{[sP]}.^{[dR]}A_{[sP]}.^{[dR]}T_{[sP]}.^{[dR]}T_{[sP]}.^{[dR]}T_{[sP]}.^{[dR]}A_{[sP]}.^{[dR]}C_{[sP]}.^{[dR]}A_{[sP]}.^{[dR]}T_{[sP]}.^{[dR]}C_{[sP]}.^{[dR]}T_{[sP]}.^{[LR]}T_{[sP]}.^{[LR][5me]}C_{[sP]}.^{[L R][5me]}C (SEQ ID NO:1122) (Compound ID No. 1122_172);
[0308] (j) ^{[LR]}A_{[sP]}.^{[dR]}A_{[sP]}.^{[dR]}T_{[sP]}.^{[LR][5me]}C_{[sP]}.^{[dR]}T_{[sP]}.^{[LR]}T_{[sP]}.^{[dR]}A_{[sP]}.^{[dR]}T_{[sP]}.^{[dR]}T_{[sP]}.^{[d R]}T_{[sP]}.^{[mR]}A_{[sP]}.^{[dR]}C_{[sP]}.^{[dR]}A_{[sP]}.^{[dR]}T_{[sP]}.^{[dR]}C_{[sP]}.^{[dR]}T_{[sP]}.^{[LR]}T_{[sP]}.^{[LR][5me]}C_{[sP]}.^{[LR][5me]}C (SEQ ID NO:1122) (Compound ID No. 1122_175);
[0309] (k) ^{[LR]}A_{[sP]}.^{[dR]}A_{[sP]}.^{[dR]}T_{[sP]}.^{[LR][5me]}C_{[sP]}.^{[dR]}T_{[sP]}.^{[LR]}T_{[sP]}.^{[dR]}A_{[sP]}.^{[dR]}T_{[sP]}.^{[dR]}T_{[sP]}.^{[d R]}T_{[sP]}.^{[dR]}A_{[sP]}.^{[dR]}C_{[sP]}.^{[dR]}A_{[sP]}.^{[dR]}T_{[sP]}.^{[dR]}C_{[sP]}.^{[dR]}T_{[sP]}.^{[LR]}T_{[sP]}.^{[fR]}C_{[sP]}.^{[LR][5me]}C (SEQ ID NO: 1122) (Compound ID No. 1122_294);
[0310] (l) ^{[LR]}A_{[sP]}.^{[dR]}A_{[sP]}.^{[dR]}T_{[sP]}.^{[mR]}C_{[sP]}.^{[dR]}T_{[sP]}.^{[LR]}T_{[sP]}.^{[dR]}A_{[sP]}.^{[dR]}T_{[sP]}.^{[dR]}T_{[sP]}.^{[dR]}T_{[s P]}.^{[dR]}A_{[sP]}.^{[dR]}C_{[sP]}.^{[dR]}A_{[sP]}.^{[dR]}T_{[sP]}.^{[dR]}C_{[sP]}.^{[dR]}T_{[sP]}.^{[LR]}T_{[sP]}.^{[LR][5me]}C_{[sP]}.^{[LR][5me]}C (SEQ ID NO:1122) (Compound ID No. 1122_296);
[0311] (m) ^{[LR]}A_{[sP]}.^{[LR]}A_{[sP]}.^{[LR]}T_{[sP]}.^{[LR][5me]}C_{[sP]}.^{[dR]}T_{[sP]}.^{[dR]}T_{[sP]}.^{[dR]}A_{[sP]}.^{[dR]}T_{[sP]}.^{[dR]}T_{[sP]}.^{[d R]}T_{[sP]}.^{[dR]}A_{[sP]}.^{[dR]}C_{[sP]}.^{[dR]}A_{[sP]}.^{[dR]}T_{[sP]}.^{[dR]}C_{[MOPS]}.^{[LR]}T_{[sP]}.^{[dR]}T_{[sP]}.^{[LR][5me]}C_{[sP]}.^{[LR][5me]}C (SEQ ID NO:1122) (Compound ID No. 1122359);
[0312] (n) ^{[LR]}A_{[sP]}.^{[LR]}A_{[sP]}.^{[LR]}T_{[sP]}.^{[LR][5me]}C_{[sP]}.^{[dR]}T_{[sP]}.^{[dR]}T_{[sP]}.^{[dR]}A_{[sP]}.^{[dR]}T_{[sP]}.^{[dR]}T_{[sP]}.^{[d R]}T_{[sP]}.^{[dR]}A_{[sP]}.^{[dR]}C_{[sP]}.^{[dR]}A_{[sP]}.^{[dR]}T_{[sP]}.^{[dR]}C_{[sP]}.^{[LR]}T_{[MOPS]}.^{[dR]}T_{[sP]}.^{[LR][5me]}C_{[sP]}.^{[LR][5me]}C (SEQ ID NO:1122) (Compound ID No. 1122384);
[0313] (o) ^{[LR]}A_{[sP]}.^{[dR]}A_{[sP]}.^{[dR]}T_{[sP]}.^{[LR][5me]}C_{[sP]}.^{[dR]}T_{[sP]}.^{[LR]}T_{[MOPS]}.^{[dR]}A_{[sP]}.^{[dR]}T_{[sP]}.^{[dR]}T_{[sP]}.^{[dR]}T_{[sP]}.^{[dR]}A_{[sP]}.^{[dR]}C_{[sP]}.^{[dR]}A_{[sP]}.^{[dR]}T_{[sP]}.^{[dR]}C_{[sP]}.^{[dR]}T_{[sP]}.^{[LR]}T_{[sP]}.^{[LR][5me]}C_{[sP]}.^{[L R][5me]}C (SEQ ID NO:1122) (Compound ID No. 1122385);
[0314] (p) ^{[LR]}G_{[sP]}.^{[LR]}A_{[sP]}.^{[dR]}A_{[sP]}.^{[dR]}T_{[sP]}.^{[LR][5me]}C_{[sP]}.^{[dR]}T_{[sP]}.^{[LR]}T_{[sP]}.^{[LR]}A_{[sP]}.^{[dR]}T_{[sP]}.^{[d R]}T_{[sP]}.^{[dR]}T_{[sP]}.^{[dR]}A_{[sP]}.^{[dR]}C_{[sP]}.^{[dR]}A_{[sP]}.^{[dR]}T_{[sP]}.^{[LR][5me]}C_{[sP]}.^{[LR]}T_{[sP]}.^{[LR]}T (SEQ ID NO:1816) (Compound ID No. 1816_13);
[0315] (q) ^{[LR]}G_{[sP]}.^{[LR]}A_{[sP]}.^{[dR]}A_{[sP]}.^{[dR]}T_{[sP]}.^{[LR][5me]}C_{[sP]}.^{[dR]}T_{[sP]}.^{[LR]}T_{[sP]}.^{[LR]}A_{[sP]}.^{[dR]}T_{[sP]}.^{[d R]}T_{[sP]}.^{[dR]}T_{[sP]}.^{[dR]}A_{[sP]}.^{[dR]}C_{[sP]}.^{[dR]}A_{[sP]}.^{[dR]}T_{[sP]}.^{[LR][5me]}C_{[sP]}.^{[LR]}T_{[sP]}.^{[LR]}T (SEQ ID NO:1816) (Compound ID No. 1816_15);
[0316] (r) ^{[LR]}G_{[sP]}.^{[LR]}A_{[sP]}.^{[dR]}A_{[sP]}.^{[dR]}T_{[sP]}.^{[LR][5me]}C_{[sP]}.^{[dR]}T_{[sP]}.^{[LR]}T_{[sP]}.^{[fR]}A_{[sP]}.^{[dR]}T_{[sP]}.^{[d R]}T_{[sP]}.^{[dR]}T_{[sP]}.^{[dR]}A_{[sP]}.^{[dR]}C_{[sP]}.^{[dR]}A_{[sP]}.^{[dR]}T_{[sP]}.^{[LR][5me]}C_{[sP]}.^{[LR]}T_{[sP]}.^{[LR]}T (SEQ ID NO:1816) (Compound ID No. 1816_28);
[0317] (s) ^{[LR]}G_{[sP]}.^{[LR]}A_{[sP]}.^{[LR]}A_{[sP]}.^{[dR]}T_{[sP]}.^{[LR][5me]}C_{[sP]}.^{[dR]}T_{[sP]}.^{[LR]}T_{[sP]}.^{[LR]}A_{[sP]}.^{[dR]}T_{[sP]}.^{[d R]}T_{[sP]}.^{[dR]}T_{[sP]}.^{[dR]}A_{[sP]}.^{[dR]}C_{[sP]}.^{[dR]}A_{[sP]}.^{[dR]}T_{[sP]}.^{[LR][5me]}C_{[sP]}.^{[LR]}T_{[sP]}.^{[LR]}T (SEQ ID NO:1816) (Compound ID No. 1816_41);
[0318] (t) ^{[LR]}G_{[sP]}.^{[LR]}A_{[sP]}.^{[dR]}A_{[sP]}.^{[dR]}T_{[sP]}.^{[LR][5me]}C_{[sP]}.^{[dR]}T_{[sP]}.^{[LR]}T_{[sP]}.^{[LR]}A_{[sP]}.^{[dR]}T_{[sP]}.^{[d R]}T_{[sP]}.^{[dR]}T_{[sP]}.^{[dR]}A_{[sP]}.^{[dR]}C_{[sP]}.^{[dR]}A_{[sP]}.^{[dR]}T_{[sP]}.^{[LR][5me]}C_{[sP]}.^{[MOE]}T_{[sP]}.^{[LR]}T (SEQ ID NO: 1816) (Compound ID No. 1816_42);
[0319] (u) ^{[LR]}G_{[sP]}.^{[LR]}A_{[sP]}.^{[dR]}A_{[sP]}.^{[dR]}T_{[sP]}.^{[LR][5me]}C_{[sP]}.^{[dR]}T_{[sP]}.^{[LR]}T_{[sP]}.^{[LR]}A_{[sP]}.^{[dR]}T_{[sP]}.^{[d R]}T_{[sP]}.^{[dR]}T_{[sP]}.^{[dR]}A_{[sP]}.^{[dR]}C_{[sP]}.^{[dR]}A_{[sP]}.^{[dR]}T_{[sP]}. [MOE][5me]C_{[sP]}.^{[LR]}T_{[sP]}.^{[LR]}T (SEQ ID NO: 1816) (Compound ID No. 1816_43);
[0320] (v) ^{[LR]}G_{[sP]}.^{[LR]}A_{[sP]}.^{[dR]}A_{[sP]}.^{[dR]}T_{[sP]}.^{[LR][5me]}C_{[sP]}.^{[dR]}T_{[sP]}.^{[LR]}T_{[sP]}.^{[mR]}A_{[sP]}.^{[dR]}T_{[sP]}.^{[d R]}T_{[sP]}.^{[dR]}T_{[sP]}.^{[dR]}A_{[sP]}.^{[dR]}C_{[sP]}.^{[dR]}A_{[sP]}.^{[dR]}T_{[sP]}.^{[LR][5me]}C_{[sP]}.^{[LR]}T_{[sP]}.^{[LR]}T (SEQ ID NO:1816) (Compound ID No. 1816_60);
[0321] (w) ^{[LR]}G_{[sP]}.^{[LR]}A_{[sP]}.^{[mR]}A_{[sP]}.^{[dR]}T_{[sP]}.^{[LR][5me]}C_{[sP]}.^{[dR]}T_{[sP]}.^{[LR]}T_{[sP]}.^{[LR]}A_{[sP]}.^{[dR]}T_{[sP]}.^{[dR]}T_{[sP]}.^{[dR]}T_{[sP]}.^{[dR]}A_{[sP]}.^{[dR]}C_{[sP]}.^{[dR]}A_{[sP]}.^{[dR]}T_{[sP]}.^{[LR][5me]}C_{[sP]}.^{[LR]}T_{[sP]}.^{[LR]}T (SEQ ID NO:1816) (Compound ID No. 1816_61);
[0322] (x) ^{[LR]}G_{[sP]}.^{[LR]}A_{[sP]}.^{[dR]}A_{[sP]}.^{[dR]}T_{[sP]}.^{[LR][5me]}C_{[sP]}.^{[dR]}T_{[sP]}.^{[LR]}T_{[sP]}.^{[LR]}A_{[sP]}.^{[dR]}T_{[sP]}.^{[d R]}T_{[sP]}.^{[dR]}T_{[sP]}.^{[dR]}A_{[sP]}.^{[dR]}C_{[sP]}.^{[dR]}A_{[sP]}.^{[dR]}T_{[sP]}.^{[fR]}C_{[sP]}.^{[LR]}T_{[sP]}.^{[LR]}T (SEQ ID NO:1816) (Compound ID No. 1816_64);
[0323] (y) ^{[LR]}G_{[sP]}.^{[LR]}A_{[sP]}.^{[dR]}A_{[sP]}.^{[dR]}T_{[sP]}.^{[LR][5me]}C_{[sP]}.^{[dR]}T_{[sP]}.^{[LR]}T_{[sP]}.^{[LR]}A_{[sP]}.^{[dR]}T_{[sP]}.^{[d R]}T_{[sP]}.^{[dR]}T_{[sP]}.^{[dR]}A_{[sP]}.^{[dR]}C_{[sP]}.^{[dR]}A_{[sP]}.^{[dR]}T_{[sP]}.^{[dR]}C_{[sP]}.^{[LR]}T_{[sP]}.^{[LR]}T (SEQ ID NO:1816) (Compound ID No. 1816_65);
[0324] (z) ^{[LR]}G_{[sP]}.^{[LR]}A_{[sP]}.^{[dR]}A_{[sP]}.^{[dR]}T_{[sP]}.^{[LR][5me]}C_{[sP]}.^{[dR]}T_{[sP]}.^{[LR]}T_{[sP]}.^{[LR]}A_{[sP]}.^{[dR]}T_{[sP]}.^{[d R]}T_{[sP]}.^{[dR]}T_{[sP]}.^{[dR]}A_{[sP]}.^{[dR]}C_{[sP]}.^{[dR]}A_{[sP]}.^{[dR]}T_{[sP]}.^{[LR][5me]}C_{[sP]}.^{[fR]}U_{[sP]}.^{[LR]}T (SEQ ID NO:1816, wherein residue 17 is U) (Compound ID No. 1816_68); or
[0325] (aa) ^{[LR]}G_{[sP]}.^{[LR]}A_{[sP]}.^{[dR]}A_{[sP]}.^{[dR]}T_{[sP]}.^{[LR][5me]}C_{[sP]}.^{[dR]}T_{[sP]}.^{[LR]}T_{[sP]}.^{[LR]}A_{[sP]}.^{[d R]}T_{[sP]}.^{[dR]}T_{[sP]}.^{[dR]}T_{[sP]}.^{[dR]}A_{[sP]}.^{[dR}C_{[sP]}.^{[dR]}A_{[sP]}.^{[dR]}T_{[sP]}.^{[LR][5me]}C_{[MOPS]}.^{[LR]}T_{[sP]}.^{LR}]T (SEQ ID NO:1816) (Compound ID No. 1816_92);

[0326] or is a pharmaceutically acceptable salt thereof, wherein

[0327] [LR] is a beta-D-oxy-LNA nucleoside,

[0328] [LR][5me]C is a beta-D-oxy-LNA 5-methyl cytosine nucleoside,

[0329] [dR] is a DNA nucleoside,

[0330] [sP] is a phosphorothioate internucleoside linkage (stereo undefined)

[0331] [ssP] is a stereodefined Sp phosphorothioate internucleoside linkage

[0332] [MOPS] is a 3-methoxypropylphosphonothioate internucleoside linkage

[0333] [MOPO] is a 3-methoxypropylphosphonate internucleoside linkage

[0334] [mR] is a 2′-O-methyl nucleoside,

[0335] [MOE] is a 2′-O-methoxyethyl nucleoside, and

[0336] [fR] is a 2′-fluoro nucleoside.

[0337] In one embodiment, the antisense oligonucleotide is the antisense oligonucleotide shown in FIG. 12A (Compound ID No. 1122_91); or a pharmaceutically acceptable salt thereof.

[0338] In one embodiment, the antisense oligonucleotide is the antisense oligonucleotide shown in FIG. 12B (Compound ID No. 1122_107); or a pharmaceutically acceptable salt thereof.

[0339] In one embodiment, the antisense oligonucleotide is the antisense oligonucleotide shown in FIG. 12C (Compound ID No. 1122_154); or a pharmaceutically acceptable salt thereof.

[0340] In one embodiment, the antisense oligonucleotide is the antisense oligonucleotide shown in FIG. 12D (Compound ID No. 1122_155); or a pharmaceutically acceptable salt thereof.

[0341] In one embodiment, the antisense oligonucleotide is the antisense oligonucleotide shown in FIG. 12E (Compound ID No. 1122_156); or a pharmaceutically acceptable salt thereof.

[0342] In one embodiment, the antisense oligonucleotide is the antisense oligonucleotide shown in FIG. 12F (Compound ID No. 1122_157); or a pharmaceutically acceptable salt thereof.

[0343] In one embodiment, the antisense oligonucleotide is the antisense oligonucleotide shown in FIG. 12G (Compound ID No. 1122_158); or a pharmaceutically acceptable salt thereof.

[0344] In one embodiment, the antisense oligonucleotide is the antisense oligonucleotide shown in FIG. 12H (Compound ID No. 1122_167); or a pharmaceutically acceptable salt thereof.

[0345] In one embodiment, the antisense oligonucleotide is the antisense oligonucleotide shown in FIG. 12I (Compound ID No. 1122_172); or a pharmaceutically acceptable salt thereof.

[0346] In one embodiment, the antisense oligonucleotide is the antisense oligonucleotide shown in FIG. 12J (Compound ID No. 1122_175); or a pharmaceutically acceptable salt thereof.

[0347] In one embodiment, the antisense oligonucleotide is the antisense oligonucleotide shown in FIG. 12K (Compound ID No. 1122_294); or a pharmaceutically acceptable salt thereof.

[0348] In one embodiment, the antisense oligonucleotide is the antisense oligonucleotide shown in FIG. 12L (Compound ID No. 1122_296); or a pharmaceutically acceptable salt thereof.

[0349] In one embodiment, the antisense oligonucleotide is the antisense oligonucleotide shown in FIG. 12M (Compound ID No. 1122_359); or a pharmaceutically acceptable salt thereof.

[0350] In one embodiment, the antisense oligonucleotide is the antisense oligonucleotide shown in FIG. 12N (Compound ID No. 1122_384); or a pharmaceutically acceptable salt thereof.

[0351] In one embodiment, the antisense oligonucleotide is the antisense oligonucleotide shown in FIG. 12O (Compound ID No. 1122_385); or a pharmaceutically acceptable salt thereof.

[0352] In one embodiment, the antisense oligonucleotide is the antisense oligonucleotide shown in FIG. 12P (Compound ID No. 1816_13); or a pharmaceutically acceptable salt thereof.

[0353] In one embodiment, the antisense oligonucleotide is the antisense oligonucleotide shown in FIG. 12Q (Compound ID No. 1816_15); or a pharmaceutically acceptable salt thereof.

[0354] In one embodiment, the antisense oligonucleotide is the antisense oligonucleotide shown in FIG. 12R (Compound ID No. 1816_28); or a pharmaceutically acceptable salt thereof.

[0355] In one embodiment, the antisense oligonucleotide is the antisense oligonucleotide shown in FIG. 12S (Compound ID No. 1816_41); or a pharmaceutically acceptable salt thereof.

[0356] In one embodiment, the antisense oligonucleotide is the antisense oligonucleotide shown in FIG. 12T (Compound ID No. 1816_42); or a pharmaceutically acceptable salt thereof.

[0357] In one embodiment, the antisense oligonucleotide is the antisense oligonucleotide shown in FIG. 12U (Compound ID No. 1816_43); or a pharmaceutically acceptable salt thereof.

[0358] In one embodiment, the antisense oligonucleotide is the antisense oligonucleotide shown in FIG. 12V (Compound ID No. 1816_60); or a pharmaceutically acceptable salt thereof.

[0359] In one embodiment, the antisense oligonucleotide is the antisense oligonucleotide shown in FIG. 12W (Compound ID No. 1816_61); or a pharmaceutically acceptable salt thereof.

[0360] In one embodiment, the antisense oligonucleotide is the antisense oligonucleotide shown in FIG. 12X (Compound ID No. 1816_64); or a pharmaceutically acceptable salt thereof.

[0361] In one embodiment, the antisense oligonucleotide is the antisense oligonucleotide shown in FIG. 12Y (Compound ID No. 1816_65); or a pharmaceutically acceptable salt thereof.

[0362] In one embodiment, the antisense oligonucleotide is the antisense oligonucleotide shown in FIG. 12Z (Compound ID No. 1816_68); or a pharmaceutically acceptable salt thereof.

[0363] In one embodiment, the antisense oligonucleotide is the antisense oligonucleotide shown in FIG. 12AA (Compound ID No. 1816_92); or a pharmaceutically acceptable salt thereof.

### III. Compositions, Methods, and Applications for Inhibition of ATXN3 Expression

[0364] A. Method of Manufacture

[0365] In a further aspect, the invention provides methods for manufacturing the oligonucleotides of the invention comprising reacting nucleotide units and thereby forming covalently linked contiguous nucleotide units comprised in the oligonucleotide. Preferably, the method uses phophoramidite chemistry (see for example Caruthers et al, 1987, Methods in Enzymology vol. 154, pages 287-313). In a further embodiment the method further comprises reacting the contiguous nucleotide sequence with a conjugating moiety (ligand) to covalently attach the conjugate moiety to the oligonucleotide. In a further aspect a method is provided for manufacturing the composition of the invention, comprising mixing the oligonucleotide or conjugated oligonucleotide of the invention with a pharmaceutically acceptable diluent, solvent, carrier, salt and/or adjuvant.

[0366] B. Pharmaceutical Composition

[0367] In a further aspect, the invention provides pharmaceutical compositions comprising any of the aforementioned oligonucleotides and/or oligonucleotide conjugates or salts thereof and a pharmaceutically acceptable diluent, carrier, salt and/or adjuvant.

[0368] In a further aspect, the invention provides pharmaceutical compositions comprising any of the aforementioned oligonucleotides and/or oligonucleotide conjugates or salts thereof and a pharmaceutically acceptable diluent, carrier, salt or adjuvant.

[0369] A pharmaceutically acceptable diluent includes phosphate-buffered saline (PBS) and pharmaceutically acceptable salts include, but are not limited to, sodium and potassium salts. In some embodiments the pharmaceutically acceptable diluent is sterile phosphate buffered saline. In some embodiments the oligonucleotide is used in the pharmaceutically acceptable diluent at a concentration of 50-300 μM solution.

[0370] The compounds according to the present invention may exist in the form of their pharmaceutically acceptable salts. The term “pharmaceutically acceptable salt” refers to conventional acid-addition salts or base-addition salts that retain the biological effectiveness and properties of the compounds of the present invention and are formed from suitable non-toxic organic or inorganic acids or organic or inorganic bases. Acid-addition salts include for example those derived from inorganic acids such as hydrochloric acid, hydrobromic acid, hydroiodic acid, sulfuric acid, sulfamic acid, phosphoric acid and nitric acid, and those derived from organic acids such as p-toluenesulfonic acid, salicylic acid, methanesulfonic acid, oxalic acid, succinic acid, citric acid, malic acid, lactic acid, fumaric acid, and the like. Base-addition salts include those derived from ammonium, potassium, sodium and, quaternary ammonium hydroxides, such as for example, tetramethyl ammonium hydroxide. The chemical modification of a pharmaceutical compound into a salt is a technique well known to pharmaceutical chemists in order to obtain improved physical and chemical stability, hygroscopicity, flowability and solubility of compounds. It is for example described in Bastin, Organic Process Research & Development 2000, 4, 427-435 or in Ansel, In: Pharmaceutical Dosage Forms and Drug Delivery Systems, 6th ed. (1995), pp. 196 and 1456-1457. For example, the pharmaceutically acceptable salt of the compounds provided herein may be a sodium salt.

[0371] Suitable formulations for use in the present invention are found in Remington's Pharmaceutical Sciences, Mack Publishing Company, Philadelphia, Pa., 17th ed., 1985. For a brief review of methods for drug delivery, see, e.g., Langer (Science 249:1527-1533, 1990). WO 2007/031091 provides further suitable and preferred examples of pharmaceutically acceptable diluents, carriers and adjuvants (hereby incorporated by reference). Suitable dosages, formulations, administration routes, compositions, dosage forms, combinations with other therapeutic agents, pro-drug formulations are also provided in WO2007/031091.

[0372] Oligonucleotides or oligonucleotide conjugates of the invention may be mixed with pharmaceutically acceptable active or inert substances for the preparation of pharmaceutical compositions or formulations. Compositions and methods for the formulation of pharmaceutical compositions are dependent upon a number of criteria, including, but not limited to, route of administration, extent of disease, or dose to be administered.

[0373] These compositions may be sterilized by conventional sterilization techniques, or may be sterile filtered. The resulting aqueous solutions may be packaged for use as is, or lyophilized, the lyophilized preparation being combined with a sterile aqueous carrier prior to administration. The pH of the preparations typically will be between 3 and 11, more preferably between 5 and 9 or between 6 and 8, and most preferably between 7 and 8, such as 7 to 7.5. The resulting compositions in solid form may be packaged in multiple single dose units, each containing a fixed amount of the above-mentioned agent or agents, such as in a sealed package of tablets or capsules. The composition in solid form can also be packaged in a container for a flexible quantity, such as in a squeezable tube designed for a topically applicable cream or ointment.

[0374] In some embodiments, the oligonucleotide or oligonucleotide conjugate of the invention is a prodrug. In particular with respect to oligonucleotide conjugates the conjugate moiety is cleaved of the oligonucleotide once the prodrug is delivered to the site of action, e.g. the target cell.

[0375] C. Applications

[0376] The oligonucleotides of the invention may be utilized as research reagents for, for example, diagnostics, therapeutics and prophylaxis.

[0377] In research, such oligonucleotides may be used to specifically modulate the synthesis of ATXN3 protein in cells (e.g. in vitro cell cultures) and experimental animals thereby facilitating functional analysis of the target or an appraisal of its usefulness as a target for therapeutic intervention. Typically the target modulation is achieved by degrading or inhibiting the mRNA producing the protein, thereby prevent protein formation or by degrading or inhibiting a modulator of the gene or mRNA producing the protein.

[0378] If employing the oligonucleotide of the invention in research or diagnostics the target nucleic acid may be a cDNA or a synthetic nucleic acid derived from DNA or RNA.

[0379] The present invention provides an in vivo or in vitro method for modulating ATXN3 expression in a target cell which is expressing ATXN3, said method comprising administering an oligonucleotide of the invention in an effective amount to said cell.

[0380] In some embodiments, the target cell, is a mammalian cell in particular a human cell. The target cell may be an in vitro cell culture or an in vivo cell forming part of a tissue in a mammal.

[0381] In diagnostics the oligonucleotides may be used to detect and quantitate ATXN3 expression in cell and tissues by northern blotting, in-situ hybridisation or similar techniques.

[0382] For therapeutics, an animal or a human, suspected of having a disease or disorder, which can be treated by modulating the expression of ATXN3

[0383] The invention provides methods for treating or preventing a disease, comprising administering a therapeutically or prophylactically effective amount of an oligonucleotide, an oligonucleotide conjugate or a pharmaceutical composition of the invention to a subject suffering from or susceptible to the disease.

[0384] The invention also relates to an oligonucleotide, a composition or a conjugate as defined herein for use as a medicament.

[0385] The oligonucleotide, oligonucleotide conjugate or a pharmaceutical composition according to the invention is typically administered in an effective amount.

[0386] The invention also provides for the use of the oligonucleotide or oligonucleotide conjugate of the invention as described for the manufacture of a medicament for the treatment of a disorder as referred to herein, or for a method of the treatment of as a disorder as referred to herein.

[0387] The disease or disorder, as referred to herein, is associated with expression of ATXN3. In some embodiments disease or disorder may be associated with a mutation in the ATXN3 gene. Therefore, in some embodiments, the target nucleic acid is a mutated form of the ATXN3 sequence.

[0388] The methods of the invention are preferably employed for treatment or prophylaxis against diseases caused by abnormal levels and/or activity of ATXN3.

[0389] The invention further relates to use of an oligonucleotide, oligonucleotide conjugate or a pharmaceutical composition as defined herein for the manufacture of a medicament for the treatment of abnormal levels and/or activity of ATXN3.

[0390] In one embodiment, the invention relates to oligonucleotides, oligonucleotide conjugates or pharmaceutical compositions for use in the treatment of spinocerebellar ataxia.

[0391] D. Administration

[0392] In some embodiments, the oligonucleotides or pharmaceutical compositions of the present invention may be administered oral. In further embodiments, the oligonucleotides or pharmaceutical compositions of the present invention may be administered topical or enteral or parenteral (such as, intravenous, subcutaneous, intra-muscular, intracerebral, intracerebroventricular or intrathecal).

[0393] In a preferred embodiment the oligonucleotide or pharmaceutical compositions of the present invention are administered by a parenteral route including intravenous, intraarterial, subcutaneous, intraperitoneal or intramuscular injection or infusion, intrathecal or intracranial, e.g. intracerebral or intraventricular, intravitreal administration. In one embodiment the active oligonucleotide or oligonucleotide conjugate is administered intravenously. In another embodiment the active oligonucleotide or oligonucleotide conjugate is administered subcutaneously.

[0394] In some embodiments, the oligonucleotide, oligonucleotide conjugate or pharmaceutical composition of the invention is administered at a dose of 0.1-15 mg/kg, such as from 0.2-10 mg/kg, such as from 0.25-5 mg/kg. The administration can be once a week, every 2^{nd} week, every third week or even once a month.

[0395] E. Combination therapies

[0396] In some embodiments the oligonucleotide, oligonucleotide conjugate or pharmaceutical composition of the invention is for use in a combination treatment with another therapeutic agent. The therapeutic agent can for example be the standard of care for the diseases or disorders described above.

### EXAMPLES

[0397] Materials and Methods:

[0398] Oligonucleotide Synthesis:

[0399] Oligonucleotide synthesis is generally known in the art. Below is a protocol which may be applied. The oligonucleotides of the present invention may have been produced by slightly varying methods in terms of apparatus, support and concentrations used.

[0400] Oligonucleotides are synthesized on uridine universal supports using the phosphoramidite approach on an MermMade 192 oligonucleotide synthesizer at 1 μmol scale. At the end of the synthesis, the oligonucleotides are cleaved from the solid support using aqueous ammonia for 5-16 hours at 60° C. For any MOPS and MOPO modifications, the oligonucleotides are deprotected at room temperature for −16 hours. The oligonucleotides are purified by reverse phase HPLC (RP-HPLC) or by solid phase extractions and characterized by UPLC, and the molecular mass is further confirmed by ESI-MS.

[0401] Elongation of The Oligonucleotide:

[0402] The coupling of 5′DMTr protected nucleoside O-cyanoethyl-phosphoramidites, including DNA-A(Bz), DNA-G(iBu), DNA-C(Bz), DNA-T, LNA-5-methyl-C(Bz), LNA-A(Bz), LNA-G(dmf), LNA-T, MOE-A(Bz), MOE-G(iBu), MOE-(T), MOE-(U), MOE-5-methyl-C(Bz), 2′F-A(Bz), 2′F(T), 2′F(U), 2′F—C(Ac), 2′F-G(iBu), 2′OMe-A(Bz), 2′OMe(U), 2′OMe(T), 2′OMe-C(Ac), 2′OMe-G(iBu), 2′OMe-G(dmf), MOP-dA(Bz), MOP-dT, MOP-dC(Ac), MOP-dG(iBu), MOP-LNA-A(Bz), MOP-LNA-T, MOP-LNA-C(Bz), MOP-LNA-G(iBu), MOP-LNA-G(dmf) is performed by using a solution of 0.1 M of the 5′-O-DMT-protected amidite in acetonitrile and DCI (4,5-dicyanoimidazole) in acetonitrile (0.25 M) as activator.

[0403] Purification by RP-HPLC:

[0404] The crude compounds are purified by preparative RP-HPLC on a Phenomenex Jupiter C18 10μ150×10 mm column. 0.1 M ammonium acetate pH 8 and acetonitrile is used as buffers at a flow rate of 5 mL/min. The collected fractions are lyophilized to give the purified compound typically as a white solid.

### Abbreviations

[0405] DCI 4,5-Dicyanoimidazole

[0406] DCM: Dichloromethane

[0407] DMF: Dimethylformamidine

[0408] DMT: 4,4′-Dimethoxytrityl

[0409] THF: Tetrahydrofurane

[0410] Bz: Benzoyl

[0411] Ibu: Isobutyryl

[0412] RP-HPLC: Reverse phase high performance liquid chromatography

[0413] Tₘ Assay:

[0414] Oligonucleotide and RNA target (phosphate linked, PO) duplexes are diluted to 3 mM in 500 ml RNase-free water and mixed with 500 ml 2×Tₘ-buffer (200 mM NaCl, 0.2 mM EDTA, 20 mM Naphosphate, pH 7.0). The solution is heated to 95° C. for 3 min and then allowed to anneal in room temperature for 30 min. The duplex melting temperatures (Tₘ) is measured on a Lambda 40 UV/VIS Spectrophotometer equipped with a Peltier temperature programmer PTP6 using PE Templab software (Perkin Elmer). The temperature is ramped up from 20° C. to 95° C. and then down to 25° C., recording absorption at 260 nm. First derivative and the local maximums of both the melting and annealing are used to assess the duplex Tₘ.

[0415] Cell Lines:

TABLE 2
Details in relation to the cell lines for assaying the compounds:

| | | | | | Hours of | |
|---|---|---|---|---|---|---|
| | | | | Cells/well | cell incubation | |
| Cell lines | | | | (96 well | prior to | Days of |
| Name | Vendor | Cat. no. | Cell medium | plate) | treatment | treatment |
| A431 | ECACC | 85090402 | EMEM (Cat. no. | 8000 | 24 | 3 |
| | | | M2279), 10% FBS | | | |
| | | | (Cat. no. F7524), | | | |
| | | | 2 mM Glutamine | | | |
| | | | (Cat. no. G8541), | | | |
| | | | 0.1 mM NEAA | | | |
| | | | (Cat. no. M7145), | | | |
| | | | 25 μg/ml Gentamicin | | | |
| | | | (Cat. no. G1397) | | | |
| NCI-H23 | ATCC | CRL-5800 | RPMI 1640 | 10000 | 24 | 3 |
| | | | (Cat. no. R2405), | | | |
| | | | 10% FBS (Cat. no. | | | |
| | | | F7524), 10 mM | | | |
| | | | Hepes (Cat. no. | | | |
| | | | H0887), 1 mM | | | |
| | | | Sodium Pyruvate | | | |
| | | | (Cat. no. S8636), | | | |
| | | | 25 μg/ml Gentamicin | | | |
| | | | (Cat. no. G1397) | | | |
| ARPE19 | ATCC | CRL-2302 | DMEM/F-12 HAM | 2000 | 0 | 4 |
| | | | (Cat. no. D8437), | | | |
| | | | 10% FBS (Cat. no. | | | |
| | | | F7524), 25 μg/ml | | | |
| | | | Gentamicin | | | |
| | | | (Cat. no. G1397) | | | |
| U251 | ECACC | 9063001 | EMEM (Cat. no. | 2000 | 0 | 4 |
| | | | M2279), 10% FBS | | | |
| | | | (Cat. no. F7524), | | | |
| | | | 2 mM Glutamine | | | |
| | | | (Cat. no. G8541), | | | |
| | | | 0.1 mM NEAA | | | |
| | | | (Cat. no. M7145), | | | |
| | | | 1 mM Sodium Pyruvate | | | |
| | | | (Cat. no. S8636), | | | |
| | | | 25 μg/ml Gentamicin | | | |
| | | | (Cat. no. G1397) | | | |
| U2-OS | ATCC | HTB-96 | MCCoy 5A medium | 7000 | 24 | 3 |
| | | | (Cat. no. M8403), | | | |
| | | | 10% FBS (Cat. no. | | | |
| | | | F7524), 1.5 mM | | | |
| | | | Glutamine (Cat. no. | | | |
| | | | G8541), 25 μg/ml | | | |
| | | | Gentamicin | | | |
| | | | (Cat. no. G1397) | | | |
| SK-N-AS | ATCC | CRL-2137 | Dulbecco's Modified | 9300 | 24 | 4 |
| | | | Eagle's Medium, | | | |
| | | | supplemented with | | | |
| | | | 0.1 mM Non-Essential | | | |
| | | | Amino Acids (NEAA) | | | |
| | | | and fetal bovine | | | |
| | | | serum to a final | | | |
| | | | concentration of 10% | | | |
| iCell ® | Stemcell | R1034 | BrainPhys Neuronal | 50.000-80.000 | 168 | 4 |
| GlutaNeurons | Technologies | | Medium (Cat. no. | | | |
| | | | 5790) supplemented | | | |
| | | | with iCell ® | | | |
| | | | GlutaNeurons Kit | | | |
| | | | (Stemcell Technologies. | | | |
| | | | no. R1034) according | | | |
| | | | to vendor), N-2 | | | |
| | | | (Thermo Fisher), | | | |
| | | | 1 μg/ml Laminin 512 | | | |
| | | | (BioLamina, no. LN521) | | | |

* All medium and additives are purchased from Sigma Aldrich unless otherweise stated.

### Example 1: Testing In Vitro Efficacy of LNA Oligonucleotides in SK—N-AS, A431, NCI-H23 and ARPE19 Cell Lines at 25 and 5 μM

[0416] Materials and Methods:

[0417] An oligonucleotide screen is performed in human cell lines using the LNA oligonucleotides in Table 3 (CMP ID NO: 4_1-1089_1, see column “oligonucleotide compounds”) targeting SEQ ID NO: 1. The human cell lines SK-N-AS, A341, NCI-H23 and ARPE19 are purchased from the vendors listed in Table 2, and are maintained as recommended by the supplier in a humidified incubator at 37° C. with 5% CO₂. For the screening assays, cells are seeded in 96 multi well plates in media recommended by the supplier (see Table 2 in the Materials and Methods section). The number of cells/well is optimized for each cell line (see Table 2 in the Materials and Methods section).

[0418] Cells are incubated between 0 and 24 hours before addition of the oligonucleotide in a concentration of 5 or 25 μM (dissolved in PBS). 3-4 days after addition of the oligonucleotide, the cells are harvested (The incubation times for each cell line are indicated in Table 2 in the Materials and Methods section).

[0419] RNA is extracted using the Qiagen RNeasy 96 kit (74182), according to the manufacturer's instructions). cDNA synthesis and qPCR is performed using qScript XLT one-step RT-qPCR ToughMix Low ROX, 95134-100 (Quanta Biosciences). Target transcript levels are quantified using FAM labeled TaqMan assays from Thermo Fisher Scientific in a multiplex reaction with a VIC labelled GUSB control. TaqMan primer assays for the target transcript of interest ATXN3 (see below) and a house keeping gene GUSB (4326320E VIC-MGB probe).

[0420] ATXN3 primer assay (Assay ID: N/A Item Name Hs.PT.58.39355049):

Forward primer:
(SEQ ID NO: 1128)
GTTTCTAAAGACATGGTCACAGC
Reverse:
(SEQ ID NO: 1129)
CTATCAGGACAGAGTTCACATCC
Probe:
(SEQ ID NO: 1130)
56-FAM/AAAGGCCAG/ZEN/CCACCAGTTCAGG/3IABkFQ/

### Results:

[0421] The relative ATXN3 mRNA expression levels are determined as % of control (PBS-treated cells) i.e. the lower the value the larger the inhibition.

TABLE 3
Sequence Motifs and Compounds of Exemplary Compounds of the Invention

| SEQ | | | | | CMP ID | Oligonucteotide |
|---|---|---|---|---|---|---|
| ID NO | motif sequence | start | end | design | NO | compound |
| 4 | aagaaaccaaaccc | 743 | 756 | 2-10-2 | 4_1 | AAgaaaccaaacCC |
| 5 | aaagaaaccaaacc | 744 | 757 | 2-10-2 | 5_1 | AAagaaaccaaaCC |
| 6 | aaaagaaaccaaac | 745 | 758 | 2-10-2 | 6_1 | AAaagaaaccaaA |
| | | | | | | C |
| 7 | caaaagaaaccaaa | 746 | 759 | 2-10-2 | 7_1 | CAaaagaaaccaA |
| | | | | | | A |
| 8 | ccaaaagaaaccaa | 747 | 760 | 2-10-2 | 8_1 | CCaaaagaaaccAA |
| 9 | tccactcctaatac | 803 | 816 | 2-10-2 | 9_1 | TCcactcctaatAC |
| 10 | gtccactcctaata | 804 | 817 | 2-10-2 | 10_1 | GTccactcctaaTA |
| 11 | agtccactcctaat | 805 | 818 | 2-10-2 | 11_1 | AGtccactcctaAT |
| 12 | cagtccactcctaa | 806 | 819 | 2-10-2 | 12_1 | CAgtccactcctAA |
| 13 | ccagtccactccta | 807 | 820 | 2-10-2 | 13_1 | CCagtccactccTA |
| 14 | actctttccaaaca | 1012 | 1025 | 2-10-2 | 14_1 | ACtctttccaaaCA |
| 15 | aactctttccaaac | 1013 | 1026 | 2-10-2 | 15_1 | AActctttccaaAC |
| 16 | caactctttccaaa | 1014 | 1027 | 2-10-2 | 16_1 | CAactctttccaAA |
| 17 | gcaactctttccaa | 1015 | 1028 | 2-10-2 | 17_1 | GCaactctttccAA |
| 18 | agcaactctttcca | 1016 | 1029 | 2-10-2 | 18_1 | AGcaactctttcCA |
| 19 | cagcaactctttcc | 1017 | 1030 | 2-10-2 | 19_1 | CAgcaactctttCC |
| 20 | ccagcaactctttc | 1018 | 1031 | 2-10-2 | 20_1 | CCagcaactcttTC |
| 21 | accagcaactcttt | 1019 | 1032 | 2-10-2 | 21_1 | ACcagcaactctTT |
| 22 | ctcctattaaataa | 1040 | 1053 | 2-10-2 | 22_1 | CTcctattaaatAA |
| 23 | cctcctattaaata | 1041 | 1054 | 2-10-2 | 23_1 | CCtcctattaaaTA |
| 24 | tcctcctattaaat | 1042 | 1055 | 2-10-2 | 24_1 | TCctcctattaaAT |
| 25 | ctcctcctattaaa | 1043 | 1056 | 2-10-2 | 25_1 | CTcctcctattaAA |
| 26 | gctcctcctattaa | 1044 | 1057 | 2-10-2 | 26_1 | GCtcctcctattAA |
| 27 | tgctcctcctatta | 1045 | 1058 | 2-10-2 | 27_1 | TGctcctcctatTA |
| 28 | ttgctcctcctatt | 1046 | 1059 | 2-10-2 | 28_1 | TTgctcctcctaTT |
| 29 | tttgctcctcctat | 1047 | 1060 | 2-10-2 | 29_1 | TTtgctcctcctAT |
| 30 | ctttgctcctccta | 1048 | 1061 | 2-10-2 | 30_1 | CTttgctcctccTA |
| 31 | cctttgctcctcct | 1049 | 1062 | 2-10-2 | 31_1 | CetttgctcctcCT |
| 32 | ccctttgctcctcc | 1050 | 1063 | 2-10-2 | 32_1 | CCctttgctcctCC |
| 33 | accctttgctcctc | 1051 | 1064 | 2-10-2 | 33_1 | ACcctttgctccTC |
| 34 | aaccctttgctcct | 1052 | 1065 | 2-10-2 | 34_1 | AAccctttgctcCT |
| 35 | aaaccctttgctcc | 1053 | 1066 | 2-10-2 | 35_1 | AAaccctttgctCC |
| 36 | aaaaccctttgctc | 1054 | 1067 | 2-10-2 | 36_1 | AAaaccctttgcTC |
| 37 | aaaaaccctttgct | 1055 | 1068 | 2-10-2 | 37_1 | AAaaaccctttgCT |
| 38 | caaaaaccctttgc | 1056 | 1069 | 2-10-2 | 38_1 | CAaaaaccctttGC |
| 39 | acaaaaaccctttg | 1057 | 1070 | 2-10-2 | 39_1 | ACaaaaacccttTG |
| 40 | aacaaaaacccttt | 1058 | 1071 | 2-10-2 | 40_1 | AAcaaaaaccctTT |
| 41 | aaacaaaaaccctt | 1059 | 1072 | 2-10-2 | 41_1 | AAacaaaaacccTT |
| 42 | aaaacaaaaaccct | 1060 | 1073 | 2-10-2 | 42_1 | AAaacaaaaaccCT |
| 43 | taaaacaaaaaccc | 1061 | 1074 | 2-10-2 | 43_1 | TAaaacaaaaacCC |
| 44 | ataaaacaaaaacc | 1062 | 1075 | 2-10-2 | 44_1 | ATaaaacaaaaaCC |
| 45 | aataaaacaaaaac | 1063 | 1076 | 2-10-2 | 45_1 | AAtaaaacaaaaAC |
| 46 | taataaaacaaaaa | 1064 | 1077 | 2-10-2 | 46_1 | TAataaaacaaaAA |
| 47 | ttaataaaacaaaa | 1065 | 1078 | 2-10-2 | 47_1 | TTaataaaacaaAA |
| 48 | tttaataaaacaaa | 1066 | 1079 | 2-10-2 | 48_1 | TTtaataaaacaAA |
| 49 | atttaataaaacaa | 1067 | 1080 | 2-10-2 | 49_1 | ATttaataaaacAA |
| 50 | ttaaaataaaaatt | 1194 | 1207 | 2-10-2 | 50_1 | TTaaaataaaaaTT |
| 51 | tttaaaataaaaat | 1195 | 1208 | 2-10-2 | 51_1 | TTtaaaataaaaAT |
| 52 | ctttaaaataaaaa | 1196 | 1209 | 2-10-2 | 52_1 | CTttaaaataaaAA |
| 53 | tctttaaaataaaa | 1197 | 1210 | 2-10-2 | 53_1 | TCtttaaaataaAA |
| 54 | atctttaaaataaa | 1198 | 1211 | 2-10-2 | 54_1 | ATctttaaaataAA |
| 55 | catctttaaaataa | 1199 | 1212 | 2-10-2 | 55_1 | CAtctttaaaatAA |
| 56 | ccatctttaaaata | 1200 | 1213 | 2-10-2 | 56_1 | CCatctttaaaaTA |
| 57 | tctaacttaataaa | 2886 | 2899 | 2-10-2 | 57_1 | TCtaacttaataAA |
| 58 | ttctaacttaataa | 2887 | 2900 | 2-10-2 | 58_1 | TTctaacttaatAA |
| 59 | attctaacttaata | 2888 | 2901 | 2-10-2 | 59_1 | ATtctaacttaaTA |
| 60 | cattctaacttaat | 2889 | 2902 | 2-10-2 | 60_1 | CAttctaacttaAT |
| 61 | acattctaacttaa | 2890 | 2903 | 2-10-2 | 61_1 | ACattctaacttAA |
| 62 | tacattctaactta | 2891 | 2904 | 2-10-2 | 62_1 | TAcattctaactTA |
| 63 | ttacattctaactt | 2892 | 2905 | 2-10-2 | 63_1 | TTacattctaacTT |
| 64 | tttacattctaact | 2893 | 2906 | 2-10-2 | 64_1 | TTtacattctaaCT |
| 65 | ttttacattctaac | 2894 | 2907 | 2-10-2 | 65_1 | TTttacattctaAC |
| 66 | tttttacattctaa | 2895 | 2908 | 2-10-2 | 66_1 | TTtttacattctAA |
| 67 | gtttttacattcta | 2896 | 2909 | 2-10-2 | 67_1 | GTttttacattcTA |
| 68 | tgtttttacattct | 2897 | 2910 | 2-10-2 | 68_1 | TGtttttacattCT |
| 69 | ctgtttttacattc | 2898 | 2911 | 2-10-2 | 69_1 | CTgtttttacatTC |
| 70 | ttcaaatatttatt | 2969 | 2982 | 2-10-2 | 70_1 | TTcaaatatttaTT |
| 71 | attcaaatatttat | 2970 | 2983 | 2-10-2 | 71_1 | ATtcaaatatttAT |
| 72 | cattcaaatattta | 2971 | 2984 | 2-10-2 | 72_1 | CAttcaaatattTA |
| 73 | ccattcaaatattt | 2972 | 2985 | 2-10-2 | 73_1 | CCattcaaatatTT |
| 74 | cccattcaaatatt | 2973 | 2986 | 2-10-2 | 74_1 | CCcattcaaataTT |
| 75 | ccccattcaaatat | 2974 | 2987 | 2-10-2 | 75_1 | CCccattcaaatAT |
| 76 | gccccattcaaata | 2975 | 2988 | 2-10-2 | 76_1 | GCcccattcaaaTA |
| 77 | tatacatttttttc | 3173 | 3186 | 2-10-2 | 77_1 | TAtacattttttTC |
| 78 | atatacattttttt | 3174 | 3187 | 2-10-2 | 78_1 | ATatacatttttTT |
| 79 | tatatacatttttt | 3175 | 3188 | 2-10-2 | 79_1 | TAtatacattttTT |
| 80 | atatatacattttt | 3176 | 3189 | 2-10-2 | 80_1 | ATatatacatttTT |
| 81 | aatatatacatttt | 3177 | 3190 | 2-10-2 | 81_1 | AAtatatacattTT |
| 82 | aaatatatacattt | 3178 | 3191 | 2-10-2 | 82_1 | AAatatatacatTT |
| 83 | caaatatatacatt | 3179 | 3192 | 2-10-2 | 83_1 | CAaatatatacaTT |
| 84 | tcaaatatatacat | 3180 | 3193 | 2-10-2 | 84_1 | TCaaatatatacAT |
| 85 | ttcaaatatataca | 3181 | 3194 | 2-10-2 | 85_1 | TTcaaatatataCA |
| 86 | attcaaatatatac | 3182 | 3195 | 2-10-2 | 86_1 | ATtcaaatatatAC |
| 87 | cattcaaatatata | 3183 | 3196 | 2-10-2 | 87_1 | CAttcaaatataTA |
| 88 | ccattcaaatatat | 3184 | 3197 | 2-10-2 | 88_1 | CCattcaaatatAT |
| 89 | tccattcaaatata | 3185 | 3198 | 2-10-2 | 89_1 | TCcattcaaataTA |
| 90 | atccattcaaatat | 3186 | 3199 | 2-10-2 | 90_1 | ATccattcaaatAT |
| 91 | tatccattcaaata | 3187 | 3200 | 2-10-2 | 91_1 | TAtccattcaaaTA |
| 92 | ttatccattcaaat | 3188 | 3201 | 2-10-2 | 92_1 | TTatccattcaaAT |
| 93 | tttatccattcaaa | 3189 | 3202 | 2-10-2 | 931 | TTtatccattcaAA |
| 94 | ctttatccattcaa | 3190 | 3203 | 2-10-2 | 941 | CTttatccattcAA |
| 95 | tctttatccattca | 3191 | 3204 | 2-10-2 | 951 | TCtttatccattCA |
| 96 | ctctttatccattc | 3192 | 3205 | 2-10-2 | 96_1 | CTctttatccatTC |
| 97 | tctctttatccatt | 3193 | 3206 | 2-10-2 | 971 | TCtctttatccaTT |
| 98 | ccatatatatctca | 3221 | 3234 | 2-10-2 | 98_1 | CCatatatatctCA |
| 99 | accatatatatctc | 3222 | 3235 | 2-10-2 | 991 | ACcatatatatcTC |
| 100 | caccatatatatct | 3223 | 3236 | 2-10-2 | 100_1 | CAccatatatatCT |
| 101 | gcaccatatatatc | 3224 | 3237 | 2-10-2 | 101_1 | GCaccatatataTC |
| 102 | agcaccatatatat | 3225 | 3238 | 2-10-2 | 102_1 | AGcaccatatatAT |
| 103 | cagcaccatatata | 3226 | 3239 | 2-10-2 | 103_1 | CAgcaccatataTA |
| 104 | acagcaccatatat | 3227 | 3240 | 2-10-2 | 104_1 | ACagcaccatatAT |
| 105 | aacagcaccatata | 3228 | 3241 | 2-10-2 | 105_1 | AAcagcaccataTA |
| 106 | aaaacaaacaacaa | 3462 | 3475 | 2-10-2 | 106_1 | AAaacaaacaacA |
| | | | | | | A |
| 107 | taaaacaaacaaca | 3463 | 3476 | 2-10-2 | 107_1 | TAaaacaaacaaCA |
| 108 | ctaaaacaaacaac | 3464 | 3477 | 2-10-2 | 108_1 | CTaaaacaaacaAC |
| 109 | actaaaacaaacaa | 3465 | 3478 | 2-10-2 | 109_1 | ACtaaaacaaacAA |
| 110 | aactaaaacaaaca | 3466 | 3479 | 2-10-2 | 110_1 | AActaaaacaaaCA |
| 111 | gaactaaaacaaac | 3467 | 3480 | 2-10-2 | 111_1 | GAactaaaacaaAC |
| 112 | agaactaaaacaaa | 3468 | 3481 | 2-10-2 | 112_1 | AGaactaaaacaAA |
| 113 | cagaactaaaacaa | 3469 | 3482 | 2-10-2 | 113_1 | CAgaactaaaacAA |
| 114 | ccagaactaaaaca | 3470 | 3483 | 2-10-2 | 114_1 | CCagaactaaaaCA |
| 115 | accagaactaaaac | 3471 | 3484 | 2-10-2 | 115_1 | ACcagaactaaaAC |
| 116 | atgttattatcccc | 3882 | 3895 | 2-10-2 | 116_1 | ATgttattatccCC |
| 117 | tatgttattatccc | 3883 | 3896 | 2-10-2 | 117_1 | TAtgttattatcCC |
| 118 | ctatgttattatcc | 3884 | 3897 | 2-10-2 | 118_1 | CTatgttattatCC |
| 119 | tctatgttattatc | 3885 | 3898 | 2-10-2 | 119_1 | TCtatgttattaTC |
| 120 | tacactctaactct | 3908 | 3921 | 2-10-2 | 120_1 | TAcactctaactCT |
| 121 | ctacactctaactc | 3909 | 3922 | 2-10-2 | 121_1 | CTacactctaacTC |
| 122 | tctacactctaact | 3910 | 3923 | 2-10-2 | 122_1 | TCtacactctaaCT |
| 123 | ctctacactctaac | 3911 | 3924 | 2-10-2 | 123_1 | CTctacactctaAC |
| 124 | tctctacactctaa | 3912 | 3925 | 2-10-2 | 124_1 | TCtctacactctAA |
| 125 | ttctctacactcta | 3913 | 3926 | 2-10-2 | 125_1 | TTctctacactcTA |
| 126 | cttctctacactct | 3914 | 3927 | 2-10-2 | 126_1 | CTtctctacactCT |
| 127 | ccttctctacactc | 3915 | 3928 | 2-10-2 | 127_1 | CCttctctacacTC |
| 128 | tacaacacaaatca | 4102 | 4115 | 2-10-2 | 128_1 | TAcaacacaaatCA |
| 129 | ctacaacacaaatc | 4103 | 4116 | 2-10-2 | 129_1 | CTacaacacaaaTC |
| 130 | actacaacacaaat | 4104 | 4117 | 2-10-2 | 130_1 | ACtacaacacaaAT |
| 131 | aactacaacacaaa | 4105 | 4118 | 2-10-2 | 131_1 | AActacaacacaAA |
| 132 | taactacaacacaa | 4106 | 4119 | 2-10-2 | 132_1 | TAactacaacacAA |
| 133 | ctaactacaacaca | 4107 | 4120 | 2-10-2 | 133_1 | CTaactacaacaCA |
| 134 | actaactacaacac | 4108 | 4121 | 2-10-2 | 134_1 | ACtaactacaacAC |
| 135 | tactaactacaaca | 4109 | 4122 | 2-10-2 | 135_1 | TActaactacaaCA |
| 136 | ctactaactacaac | 4110 | 4123 | 2-10-2 | 136_1 | CTactaactacaAC |
| 137 | actactaactacaa | 4111 | 4124 | 2-10-2 | 137_1 | ACtactaactacAA |
| 138 | cactactaactaca | 4112 | 4125 | 2-10-2 | 138_1 | CActactaactaCA |
| 139 | acactactaactac | 4113 | 4126 | 2-10-2 | 139_1 | ACactactaactAC |
| 140 | gacactactaacta | 4114 | 4127 | 2-10-2 | 140_1 | GAcactactaacTA |
| 141 | agacactactaact | 4115 | 4128 | 2-10-2 | 141_1 | AGacactactaaCT |
| 142 | tttacccccaacct | 4173 | 4186 | 2-10-2 | 142_1 | TTtacccccaacCT |
| 143 | atttacccccaacc | 4174 | 4187 | 2-10-2 | 143_1 | ATttacccccaaCC |
| 144 | catttacccccaac | 4175 | 4188 | 2-10-2 | 144_1 | CAtttacccccaAC |
| 145 | tcatttacccccaa | 4176 | 4189 | 2-10-2 | 145_1 | TCatttacccccAA |
| 146 | atcatttaccccca | 4177 | 4190 | 2-10-2 | 146_1 | ATcatttaccccCA |
| 147 | aatcatttaccccc | 4178 | 4191 | 2-10-2 | 147_1 | AAtcatttacccCC |
| 148 | aaatcatttacccc | 4179 | 4192 | 2-10-2 | 148_1 | AAatcatttaccCC |
| 149 | caaatcatttaccc | 4180 | 4193 | 2-10-2 | 149_1 | CAaatcatttacCC |
| 150 | ccaaatcatttacc | 4181 | 4194 | 2-10-2 | 150_1 | CCaaatcatttaCC |
| 151 | accaaatcatttac | 4182 | 4195 | 2-10-2 | 151_1 | ACcaaatcatttAC |
| 152 | taccaaatcattta | 4183 | 4196 | 2-10-2 | 152_1 | TAccaaatcattTA |
| 153 | ctaccaaatcattt | 4184 | 4197 | 2-10-2 | 153_1 | CTaccaaatcatTT |
| 154 | gctaccaaatcatt | 4185 | 4198 | 2-10-2 | 154_1 | GCtaccaaatcaTT |
| 155 | tgctaccaaatcat | 4186 | 4199 | 2-10-2 | 155_1 | TGctaccaaatcAT |
| 156 | ctgctaccaaatca | 4187 | 4200 | 2-10-2 | 156_1 | CTgctaccaaatCA |
| 157 | actgctaccaaatc | 4188 | 4201 | 2-10-2 | 157_1 | ACtgctaccaaaTC |
| 158 | aactgctaccaaat | 4189 | 4202 | 2-10-2 | 158_1 | AActgctaccaaAT |
| 159 | aagctttaatcaaa | 5102 | 5115 | 2-10-2 | 159_1 | AAgctttaatcaAA |
| 160 | caagctttaatcaa | 5103 | 5116 | 2-10-2 | 160_1 | CAagctttaatcAA |
| 161 | tcaagctttaatca | 5104 | 5117 | 2-10-2 | 161_1 | TCaagctttaatCA |
| 162 | atcaagctttaatc | 5105 | 5118 | 2-10-2 | 162_1 | ATcaagctttaaTC |
| 163 | catcaagctttaat | 5106 | 5119 | 2-10-2 | 163_1 | CAtcaagctttaAT |
| 164 | tcaaactatcccca | 5131 | 5144 | 2-10-2 | 164_1 | TCaaactatcccCA |
| 165 | ctcaaactatcccc | 5132 | 5145 | 2-10-2 | 165_1 | CTcaaactatccCC |
| 166 | tctcaaactatccc | 5133 | 5146 | 2-10-2 | 166_1 | TCtcaaactatcCC |
| 167 | atctcaaactatcc | 5134 | 5147 | 2-10-2 | 167_1 | ATctcaaactatCC |
| 168 | tatctcaaactatc | 5135 | 5148 | 2-10-2 | 168_1 | TAtctcaaactaTC |
| 169 | ttatctcaaactat | 5136 | 5149 | 2-10-2 | 169_1 | TTatctcaaactAT |
| 170 | cttatctcaaacta | 5137 | 5150 | 2-10-2 | 170_1 | CTtatctcaaacTA |
| 171 | ccttatctcaaact | 5138 | 5151 | 2-10-2 | 171_1 | CCttatctcaaaCT |
| 172 | cccttatctcaaac | 5139 | 5152 | 2-10-2 | 172_1 | CCcttatctcaaAC |
| 173 | gcccttatctcaaa | 5140 | 5153 | 2-10-2 | 173_1 | GCccttatctcaAA |
| 174 | tgcccttatctcaa | 5141 | 5154 | 2-10-2 | 174_1 | TGcccttatctcAA |
| 175 | caaacttcatcaaa | 5540 | 5553 | 2-10-2 | 175_1 | CAaacttcatcaAA |
| 176 | tcaaacttcatcaa | 5541 | 5554 | 2-10-2 | 176_1 | TCaaacttcatcAA |
| 177 | atcaaacttcatca | 5542 | 5555 | 2-10-2 | 177_1 | ATcaaacttcatCA |
| 178 | aatcaaacttcatc | 5543 | 5556 | 2-10-2 | 178_1 | AAtcaaacttcaTC |
| 179 | aaatcaaacttcat | 5544 | 5557 | 2-10-2 | 179_1 | AAatcaaacttcAT |
| 180 | gaaatcaaacttca | 5545 | 5558 | 2-10-2 | 180_1 | GAaatcaaacttCA |
| 181 | tgaaatcaaacttc | 5546 | 5559 | 2-10-2 | 181_1 | TGaaatcaaactTC |
| 182 | ttgaaatcaaactt | 5547 | 5560 | 2-10-2 | 182_1 | TTgaaatcaaacTT |
| 183 | aacacaaatttcct | 5693 | 5706 | 2-10-2 | 183_1 | AAcacaaatttcCT |
| 184 | taacacaaatttcc | 5694 | 5707 | 2-10-2 | 184_1 | TAacacaaatttCC |
| 185 | ctaacacaaatttc | 5695 | 5708 | 2-10-2 | 185_1 | CTaacacaaattTC |
| 186 | gctaacacaaattt | 5696 | 5709 | 2-10-2 | 186_1 | GCtaacacaaatTT |
| 187 | tgctaacacaaatt | 5697 | 5710 | 2-10-2 | 187_1 | TGctaacacaaaTT |
| 188 | ttgctaacacaaat | 5698 | 5711 | 2-10-2 | 188_1 | TTgctaacacaaAT |
| 189 | tttgctaacacaaa | 5699 | 5712 | 2-10-2 | 189_1 | TTtgctaacacaAA |
| 190 | ctttgctaacacaa | 5700 | 5713 | 2-10-2 | 190_1 | CTttgctaacacAA |
| 191 | cctttgctaacaca | 5701 | 5714 | 2-10-2 | 191_1 | CetttgctaacaCA |
| 192 | taactaataattat | 6417 | 6430 | 2-10-2 | 192_1 | TAactaataattAT |
| 193 | ataactaataatta | 6418 | 6431 | 2-10-2 | 193_1 | ATaactaataatTA |
| 194 | aataactaataatt | 6419 | 6432 | 2-10-2 | 194_1 | AAtaactaataaTT |
| 195 | taataactaataat | 6420 | 6433 | 2-10-2 | 195_1 | TAataactaataAT |
| 196 | ataataactaataa | 6421 | 6434 | 2-10-2 | 196_1 | ATaataactaatAA |
| 197 | aataataactaata | 6422 | 6435 | 2-10-2 | 197_1 | AAtaataactaaTA |
| 198 | caataataactaat | 6423 | 6436 | 2-10-2 | 198_1 | CAataataactaAT |
| 199 | ccaataataactaa | 6424 | 6437 | 2-10-2 | 199_1 | CCaataataactAA |
| 200 | accaataataacta | 6425 | 6438 | 2-10-2 | 200_1 | ACcaataataacTA |
| 201 | aaccaataataact | 6426 | 6439 | 2-10-2 | 201_1 | AAccaataataaCT |
| 202 | taaccaataataac | 6427 | 6440 | 2-10-2 | 202_1 | TAaccaataataAC |
| 203 | ataaccaataataa | 6428 | 6441 | 2-10-2 | 203_1 | ATaaccaataatAA |
| 204 | tataaccaataata | 6429 | 6442 | 2-10-2 | 204_1 | TAtaaccaataaTA |
| 205 | gtataaccaataat | 6430 | 6443 | 2-10-2 | 205_1 | GTataaccaataAT |
| 206 | acatcacacaattt | 7415 | 7428 | 2-10-2 | 206_1 | ACatcacacaatTT |
| 207 | gacatcacacaatt | 7416 | 7429 | 2-10-2 | 207_1 | GAcatcacacaaTT |
| 208 | tgacatcacacaat | 7417 | 7430 | 2-10-2 | 208_1 | TGacatcacacaAT |
| 209 | ctgacatcacacaa | 7418 | 7431 | 2-10-2 | 209_1 | CTgacatcacacAA |
| 210 | tctgacatcacaca | 7419 | 7432 | 2-10-2 | 210_1 | TCtgacatcacaCA |
| 211 | atctgacatcacac | 7420 | 7433 | 2-10-2 | 211_1 | ATctgacatcacAC |
| 212 | ttccttaacccaac | 7436 | 7449 | 2-10-2 | 212_1 | TTccttaacccaAC |
| 213 | attccttaacccaa | 7437 | 7450 | 2-10-2 | 213_1 | ATtccttaacccAA |
| 214 | tattccttaaccca | 7438 | 7451 | 2-10-2 | 214_1 | TAttccttaaccCA |
| 215 | ctattccttaaccc | 7439 | 7452 | 2-10-2 | 215_1 | CTattccttaacCC |
| 216 | tctattccttaacc | 7440 | 7453 | 2-10-2 | 216_1 | TCtattccttaaCC |
| 217 | gtctattccttaac | 7441 | 7454 | 2-10-2 | 217_1 | GTctattccttaAC |
| 218 | catcaaatctcata | 8609 | 8622 | 2-10-2 | 218_1 | CAtcaaatctcaTA |
| 219 | gcatcaaatctcat | 8610 | 8623 | 2-10-2 | 219_1 | GCatcaaatctcAT |
| 220 | tgcatcaaatctca | 8611 | 8624 | 2-10-2 | 220_1 | TGcatcaaatctCA |
| 221 | atgcatcaaatctc | 8612 | 8625 | 2-10-2 | 221_1 | ATgcatcaaatcTC |
| 222 | aatgcatcaaatct | 8613 | 8626 | 2-10-2 | 222_1 | AAtgcatcaaatCT |
| 223 | attttaaacaaaca | 8637 | 8650 | 2-10-2 | 223_1 | ATtttaaacaaaCA |
| 224 | tattttaaacaaac | 8638 | 8651 | 2-10-2 | 224_1 | TAttttaaacaaAC |
| 225 | ttattttaaacaaa | 8639 | 8652 | 2-10-2 | 225_1 | TTattttaaacaAA |
| 226 | attattttaaacaa | 8640 | 8653 | 2-10-2 | 226_1 | ATtattttaaacAA |
| 227 | aattattttaaaca | 8641 | 8654 | 2-10-2 | 227_1 | AAttattttaaaCA |
| 228 | gaattattttaaac | 8642 | 8655 | 2-10-2 | 228_1 | GAattattttaaAC |
| 229 | ttttacaaatctac | 8693 | 8706 | 2-10-2 | 229_1 | TTttacaaatctAC |
| 230 | attttacaaatcta | 8694 | 8707 | 2-10-2 | 230_1 | ATtttacaaatcTA |
| 231 | tattttacaaatct | 8695 | 8708 | 2-10-2 | 231_1 | TAttttacaaatCT |
| 232 | ttattttacaaatc | 8696 | 8709 | 2-10-2 | 232_1 | TTattttacaaaTC |
| 233 | tttattttacaaat | 8697 | 8710 | 2-10-2 | 233_1 | TTtattttacaaAT |
| 234 | atttattttacaaa | 8698 | 8711 | 2-10-2 | 234_1 | ATttattttacaAA |
| 235 | catttattttacaa | 8699 | 8712 | 2-10-2 | 235_1 | CAtttattttacAA |
| 236 | acatttattttaca | 8700 | 8713 | 2-10-2 | 236_1 | ACatttattttaCA |
| 237 | aacatttattttac | 8701 | 8714 | 2-10-2 | 237_1 | AAcatttattttAC |
| 238 | taacatttatttta | 8702 | 8715 | 2-10-2 | 238_1 | TAacatttatttTA |
| 239 | aatttaatcattaa | 9391 | 9404 | 2-10-2 | 239_1 | AAtttaatcattAA |
| 240 | taatttaatcatta | 9392 | 9405 | 2-10-2 | 240_1 | TAatttaatcatTA |
| 241 | ataatttaatcatt | 9393 | 9406 | 2-10-2 | 241_1 | ATaatttaatcaTT |
| 242 | aataatttaatcat | 9394 | 9407 | 2-10-2 | 242_1 | AAtaatttaatcAT |
| 243 | aaataatttaatca | 9395 | 9408 | 2-10-2 | 243_1 | AAataatttaatCA |
| 244 | taaataatttaatc | 9396 | 9409 | 2-10-2 | 244_1 | TAaataatttaaTC |
| 245 | ctaaataatttaat | 9397 | 9410 | 2-10-2 | 245_1 | CTaaataatttaAT |
| 246 | cctaaataatttaa | 9398 | 9411 | 2-10-2 | 246_1 | CCtaaataatttAA |
| 247 | ccctaaataattta | 9399 | 9412 | 2-10-2 | 247_1 | CCctaaataattTA |
| 248 | cccctaaataattt | 9400 | 9413 | 2-10-2 | 248_1 | CCcctaaataatTT |
| 249 | tcccctaaataatt | 9401 | 9414 | 2-10-2 | 249_1 | TCccctaaataaTT |
| 250 | tatataaaaatcta | 10958 | 10971 | 2-10-2 | 250_1 | TAtataaaaatcTA |
| 251 | ctatataaaaatct | 10959 | 10972 | 2-10-2 | 251_1 | CTatataaaaatCT |
| 252 | tctatataaaaatc | 10960 | 10973 | 2-10-2 | 252_1 | TCtatataaaaaTC |
| 253 | atctatataaaaat | 10961 | 10974 | 2-10-2 | 253_1 | ATctatataaaaAT |
| 254 | tatctatataaaaa | 10962 | 10975 | 2-10-2 | 254_1 | TAtctatataaaAA |
| 255 | ttatctatataaaa | 10963 | 10976 | 2-10-2 | 255_1 | TTatctatataaAA |
| 256 | tttatctatataaa | 10964 | 10977 | 2-10-2 | 256_1 | TTtatctatataAA |
| 257 | ccccactctaatat | 11001 | 11014 | 2-10-2 | 257_1 | CCccactctaatAT |
| 258 | gccccactctaata | 11002 | 11015 | 2-10-2 | 258_1 | GCcccactctaaTA |
| 259 | tgccccactctaat | 11003 | 11016 | 2-10-2 | 259_1 | TGccccactctaAT |
| 260 | atgccccactctaa | 11004 | 11017 | 2-10-2 | 260_1 | ATgccccactctAA |
| 261 | aatgccccactcta | 11005 | 11018 | 2-10-2 | 261_1 | AAtgccccactcTA |
| 262 | aaatgccccactct | 11006 | 11019 | 2-10-2 | 262_1 | AAatgccccactCT |
| 263 | taaatgccccactc | 11007 | 11020 | 2-10-2 | 263_1 | TAaatgccccacTC |
| 264 | ttaaatgccccact | 11008 | 11021 | 2-10-2 | 264_1 | TTaaatgccccaCT |
| 265 | atataaccaccaaa | 11546 | 11559 | 2-10-2 | 265_1 | ATataaccaccaAA |
| 266 | tatataaccaccaa | 11547 | 11560 | 2-10-2 | 266_1 | TAtataaccaccAA |
| 267 | atatataaccacca | 11548 | 11561 | 2-10-2 | 267_1 | ATatataaccacCA |
| 268 | tatatataaccacc | 11549 | 11562 | 2-10-2 | 268_1 | TAtatataaccaCC |
| 269 | atatatataaccac | 11550 | 11563 | 2-10-2 | 269_1 | ATatatataaccAC |
| 270 | aaaattcactatct | 11942 | 11955 | 2-10-2 | 270_1 | AAaattcactatCT |
| 271 | gaaaattcactatc | 11943 | 11956 | 2-10-2 | 271_1 | GAaaattcactaTC |
| 272 | tgaaaattcactat | 11944 | 11957 | 2-10-2 | 272_1 | TGaaaattcactAT |
| 273 | ctgaaaattcacta | 11945 | 11958 | 2-10-2 | 273_1 | CTgaaaattcacTA |
| 274 | tctgaaaattcact | 11946 | 11959 | 2-10-2 | 274_1 | TCtgaaaattcaCT |
| 275 | tactatatacatct | 12176 | 12189 | 2-10-2 | 275_1 | TActatatacatCT |
| 276 | ctactatatacatc | 12177 | 12190 | 2-10-2 | 276_1 | CTactatatacaTC |
| 277 | tctactatatacat | 12178 | 12191 | 2-10-2 | 277_1 | TCtactatatacAT |
| 278 | gtctactatataca | 12179 | 12192 | 2-10-2 | 278_1 | GTctactatataCA |
| 279 | agtctactatatac | 12180 | 12193 | 2-10-2 | 279_1 | AGtctactatatAC |
| 280 | tagtctactatata | 12181 | 12194 | 2-10-2 | 280_1 | TAgtctactataTA |
| 281 | ctagtctactatat | 12182 | 12195 | 2-10-2 | 281_1 | CTagtctactatAT |
| 282 | actagtctactata | 12183 | 12196 | 2-10-2 | 282_1 | ACtagtctactaTA |
| 283 | aactagtctactat | 12184 | 12197 | 2-10-2 | 283_1 | AActagtctactAT |
| 284 | tattctacccataa | 12211 | 12224 | 2-10-2 | 284_1 | TAttctacccatAA |
| 285 | atattctacccata | 12212 | 12225 | 2-10-2 | 285_1 | ATattctacccaTA |
| 286 | tatattctacccat | 12213 | 12226 | 2-10-2 | 286_1 | TAtattctacccAT |
| 287 | gtatattctaccca | 12214 | 12227 | 2-10-2 | 287_1 | GTatattctaccCA |
| 288 | tgtatattctaccc | 12215 | 12228 | 2-10-2 | 288_1 | TGtatattctacCC |
| 289 | atgtatattctacc | 12216 | 12229 | 2-10-2 | 289_1 | ATgtatattctaCC |
| 290 | ccacacaattccta | 12254 | 12267 | 2-10-2 | 290_1 | CCacacaattccTA |
| 291 | accacacaattcct | 12255 | 12268 | 2-10-2 | 291_1 | ACcacacaattcCT |
| 292 | aaccacacaattcc | 12256 | 12269 | 2-10-2 | 292_1 | AAccacacaattCC |
| 293 | aaaccacacaattc | 12257 | 12270 | 2-10-2 | 293_1 | AAaccacacaatTC |
| 294 | aaaaccacacaatt | 12258 | 12271 | 2-10-2 | 294_1 | AAaaccacacaaTT |
| 295 | gaaaaccacacaat | 12259 | 12272 | 2-10-2 | 295_1 | GAaaaccacacaAT |
| 296 | agaaaaccacacaa | 12260 | 12273 | 2-10-2 | 296_1 | AGaaaaccacacA |
| | | | | | | A |
| 297 | cagaaaaccacaca | 12261 | 12274 | 2-10-2 | 297_1 | CAgaaaaccacaCA |
| 298 | ccagaaaaccacac | 12262 | 12275 | 2-10-2 | 298_1 | CCagaaaaccacAC |
| 299 | tccagaaaaccaca | 12263 | 12276 | 2-10-2 | 299_1 | TCcagaaaaccaCA |
| 300 | aaatccataaaaaa | 12327 | 12340 | 2-10-2 | 300_1 | AAatccataaaaAA |
| 301 | taaatccataaaaa | 12328 | 12341 | 2-10-2 | 301_1 | TAaatccataaaAA |
| 302 | ctaaatccataaaa | 12329 | 12342 | 2-10-2 | 302_1 | CTaaatccataaAA |
| 303 | actaaatccataaa | 12330 | 12343 | 2-10-2 | 303_1 | ACtaaatccataAA |
| 304 | cactaaatccataa | 12331 | 12344 | 2-10-2 | 304_1 | CActaaatccatAA |
| 305 | tcactaaatccata | 12332 | 12345 | 2-10-2 | 305_1 | TCactaaatccaTA |
| 306 | atcactaaatccat | 12333 | 12346 | 2-10-2 | 306_1 | ATcactaaatccAT |
| 307 | tatcactaaatcca | 12334 | 12347 | 2-10-2 | 307_1 | TAtcactaaatcCA |
| 308 | atatcactaaatcc | 12335 | 12348 | 2-10-2 | 308_1 | ATatcactaaatCC |
| 309 | tatatcactaaatc | 12336 | 12349 | 2-10-2 | 309_1 | TAtatcactaaaTC |
| 310 | atatatcactaaat | 12337 | 12350 | 2-10-2 | 310_1 | ATatatcactaaAT |
| 311 | gatatatcactaaa | 12338 | 12351 | 2-10-2 | 311_1 | GAtatatcactaAA |
| 312 | agatatatcactaa | 12339 | 12352 | 2-10-2 | 312_1 | AGatatatcactAA |
| 313 | tagatatatcacta | 12340 | 12353 | 2-10-2 | 313_1 | TAgatatatcacTA |
| 314 | tataaatttctcta | 12690 | 12703 | 2-10-2 | 314_1 | TAtaaatttctcTA |
| 315 | atataaatttctct | 12691 | 12704 | 2-10-2 | 315_1 | ATataaatttctCT |
| 316 | tatataaatttctc | 12692 | 12705 | 2-10-2 | 316_1 | TAtataaatttcTC |
| 317 | atatataaatttct | 12693 | 12706 | 2-10-2 | 317_1 | ATatataaatttCT |
| 318 | catatataaatttc | 12694 | 12707 | 2-10-2 | 318_1 | CAtatataaattTC |
| 319 | tcatatataaattt | 12695 | 12708 | 2-10-2 | 319_1 | TCatatataaatTT |
| 320 | ctccattccaaatt | 12739 | 12752 | 2-10-2 | 320_1 | CTccattccaaaTT |
| 321 | actccattccaaat | 12740 | 12753 | 2-10-2 | 321_1 | ACtccattccaaAT |
| 322 | cactccattccaaa | 12741 | 12754 | 2-10-2 | 322_1 | CActccattccaAA |
| 323 | ccactccattccaa | 12742 | 12755 | 2-10-2 | 323_1 | CCactccattccAA |
| 324 | accactccattcca | 12743 | 12756 | 2-10-2 | 324_1 | ACcactccattcCA |
| 325 | aaccactccattcc | 12744 | 12757 | 2-10-2 | 325_1 | AAccactccattCC |
| 326 | aaaccactccattc | 12745 | 12758 | 2-10-2 | 326_1 | AAaccactccatTC |
| 327 | tcacacaaccatat | 13155 | 13168 | 2-10-2 | 327_1 | TCacacaaccatAT |
| 328 | atcacacaaccata | 13156 | 13169 | 2-10-2 | 328_1 | ATcacacaaccaTA |
| 329 | gatcacacaaccat | 13157 | 13170 | 2-10-2 | 329_1 | GAtcacacaaccAT |
| 330 | agatcacacaacca | 13158 | 13171 | 2-10-2 | 330_1 | AGatcacacaacCA |
| 331 | aagatcacacaacc | 13159 | 13172 | 2-10-2 | 331_1 | AAgatcacacaaCC |
| 332 | aaagatcacacaac | 13160 | 13173 | 2-10-2 | 332_1 | AAagatcacacaAC |
| 333 | aaaagatcacacaa | 13161 | 13174 | 2-10-2 | 333_1 | AAaagatcacacAA |
| 334 | taaaagatcacaca | 13162 | 13175 | 2-10-2 | 334_1 | TAaaagatcacaCA |
| 335 | ttcatttctaaaaa | 13297 | 13310 | 2-10-2 | 335_1 | TTcatttctaaaAA |
| 336 | tttcatttctaaaa | 13298 | 13311 | 2-10-2 | 336_1 | TTtcatttctaaAA |
| 337 | ctttcatttctaaa | 13299 | 13312 | 2-10-2 | 337_1 | CTttcatttctaAA |
| 338 | tctttcatttctaa | 13300 | 13313 | 2-10-2 | 338_1 | TCtttcatttctAA |
| 339 | atctttcatttcta | 13301 | 13314 | 2-10-2 | 339_1 | ATctttcatttcTA |
| 340 | gatctttcatttct | 13302 | 13315 | 2-10-2 | 340_1 | GAtctttcatttCT |
| 341 | tgatctttcatttc | 13303 | 13316 | 2-10-2 | 341_1 | TGatctttcattTC |
| 342 | atgatctttcattt | 13304 | 13317 | 2-10-2 | 342_1 | ATgatctttcatTT |
| 343 | ataaaaacccactt | 13990 | 14003 | 2-10-2 | 343_1 | ATaaaaacccacTT |
| 344 | cataaaaacccact | 13991 | 14004 | 2-10-2 | 344_1 | CAtaaaaacccaCT |
| 345 | acataaaaacccac | 13992 | 14005 | 2-10-2 | 345_1 | ACataaaaacccAC |
| 346 | cacataaaaaccca | 13993 | 14006 | 2-10-2 | 346_1 | CAcataaaaaccCA |
| 347 | tcacataaaaaccc | 13994 | 14007 | 2-10-2 | 347_1 | TCacataaaaacCC |
| 348 | atcacataaaaacc | 13995 | 14008 | 2-10-2 | 348_1 | ATcacataaaaaCC |
| 349 | catcacataaaaac | 13996 | 14009 | 2-10-2 | 349_1 | CAtcacataaaaAC |
| 350 | tcatcacataaaaa | 13997 | 14010 | 2-10-2 | 350_1 | TCatcacataaaAA |
| 351 | gtcatcacataaaa | 13998 | 14011 | 2-10-2 | 351_1 | GTcatcacataaAA |
| 352 | agtcatcacataaa | 13999 | 14012 | 2-10-2 | 352_1 | AGtcatcacataAA |
| 353 | tagtcatcacataa | 14000 | 14013 | 2-10-2 | 353_1 | TAgtcatcacatAA |
| 354 | atagtcatcacata | 14001 | 14014 | 2-10-2 | 354_1 | ATagtcatcacaTA |
| 355 | catagtcatcacat | 14002 | 14015 | 2-10-2 | 355_1 | CAtagtcatcacAT |
| 356 | taaatacaaatcta | 14041 | 14054 | 2-10-2 | 356_1 | TAaatacaaatcTA |
| 357 | ctaaatacaaatct | 14042 | 14055 | 2-10-2 | 357_1 | CTaaatacaaatCT |
| 358 | gctaaatacaaatc | 14043 | 14056 | 2-10-2 | 358_1 | GCtaaatacaaaTC |
| 359 | tgctaaatacaaat | 14044 | 14057 | 2-10-2 | 359_1 | TGctaaatacaaAT |
| 360 | atgctaaatacaaa | 14045 | 14058 | 2-10-2 | 360_1 | ATgctaaatacaAA |
| 361 | tatgctaaatacaa | 14046 | 14059 | 2-10-2 | 361_1 | TAtgctaaatacAA |
| 362 | aatcttacactaaa | 14119 | 14132 | 2-10-2 | 362_1 | AAtcttacactaAA |
| 363 | taatcttacactaa | 14120 | 14133 | 2-10-2 | 363_1 | TAatcttacactAA |
| 364 | ataatcttacacta | 14121 | 14134 | 2-10-2 | 364_1 | ATaatcttacacTA |
| 365 | aataatcttacact | 14122 | 14135 | 2-10-2 | 365_1 | AAtaatcttacaCT |
| 366 | gaataatcttacac | 14123 | 14136 | 2-10-2 | 366_1 | GAataatcttacAC |
| 367 | tgaataatcttaca | 14124 | 14137 | 2-10-2 | 367_1 | TGaataatcttaCA |
| 368 | atgaataatcttac | 14125 | 14138 | 2-10-2 | 368_1 | ATgaataatcttAC |
| 369 | caaaattctaataa | 14257 | 14270 | 2-10-2 | 369_1 | CAaaattctaatAA |
| 370 | tcaaaattctaata | 14258 | 14271 | 2-10-2 | 370_1 | TCaaaattctaaTA |
| 371 | ttcaaaattctaat | 14259 | 14272 | 2-10-2 | 371_1 | TTcaaaattctaAT |
| 372 | attcaaaattctaa | 14260 | 14273 | 2-10-2 | 372_1 | ATtcaaaattctAA |
| 373 | gattcaaaattcta | 14261 | 14274 | 2-10-2 | 373_1 | GAttcaaaattcTA |
| 374 | agattcaaaattct | 14262 | 14275 | 2-10-2 | 374_1 | AGattcaaaattCT |
| 375 | attactacaaccaa | 14570 | 14583 | 2-10-2 | 375_1 | ATtactacaaccAA |
| 376 | cattactacaacca | 14571 | 14584 | 2-10-2 | 376_1 | CAttactacaacCA |
| 377 | ccattactacaacc | 14572 | 14585 | 2-10-2 | 377_1 | CCattactacaaCC |
| 378 | accattactacaac | 14573 | 14586 | 2-10-2 | 378_1 | ACcattactacaAC |
| 379 | aaccattactacaa | 14574 | 14587 | 2-10-2 | 379_1 | AAccattactacAA |
| 380 | aaaccattactaca | 14575 | 14588 | 2-10-2 | 380_1 | AAaccattactaCA |
| 381 | gaaaccattactac | 14576 | 14589 | 2-10-2 | 381_1 | GAaaccattactAC |
| 382 | tgaaaccattacta | 14577 | 14590 | 2-10-2 | 382_1 | TGaaaccattacTA |
| 383 | atgaaaccattact | 14578 | 14591 | 2-10-2 | 383_1 | ATgaaaccattaCT |
| 384 | atttttaaaaacac | 15778 | 15791 | 2-10-2 | 384_1 | ATttttaaaaacAC |
| 385 | aatttttaaaaaca | 15779 | 15792 | 2-10-2 | 385_1 | AAtttttaaaaaCA |
| 386 | taatttttaaaaac | 15780 | 15793 | 2-10-2 | 386_1 | TAatttttaaaaAC |
| 387 | ataatttttaaaaa | 15781 | 15794 | 2-10-2 | 387_1 | ATaatttttaaaAA |
| 388 | cataatttttaaaa | 15782 | 15795 | 2-10-2 | 388_1 | CAtaatttttaaAA |
| 389 | tcataatttttaaa | 15783 | 15796 | 2-10-2 | 389_1 | TCataatttttaAA |
| 390 | atcataatttttaa | 15784 | 15797 | 2-10-2 | 390_1 | ATcataatttttAA |
| 391 | ctttatacaaaaaa | 15814 | 15827 | 2-10-2 | 391_1 | CTttatacaaaaAA |
| 392 | actttatacaaaaa | 15815 | 15828 | 2-10-2 | 392_1 | ACtttatacaaaAA |
| 393 | tactttatacaaaa | 15816 | 15829 | 2-10-2 | 393_1 | TActttatacaaAA |
| 394 | ttactttatacaaa | 15817 | 15830 | 2-10-2 | 394_1 | TTactttatacaAA |
| 395 | cttactttatacaa | 15818 | 15831 | 2-10-2 | 395_1 | CTtactttatacAA |
| 396 | gcttactttataca | 15819 | 15832 | 2-10-2 | 396_1 | GCttactttataCA |
| 397 | tgcttactttatac | 15820 | 15833 | 2-10-2 | 397_1 | TGcttactttatAC |
| 398 | tctcaaaataataa | 15877 | 15890 | 2-10-2 | 398_1 | TCtcaaaataatAA |
| 399 | ctctcaaaataata | 15878 | 15891 | 2-10-2 | 399_1 | CTctcaaaataaTA |
| 400 | tctctcaaaataat | 15879 | 15892 | 2-10-2 | 400_1 | TCtctcaaaataAT |
| 401 | atctctcaaaataa | 15880 | 15893 | 2-10-2 | 401_1 | ATctctcaaaatAA |
| 402 | aatctctcaaaata | 15881 | 15894 | 2-10-2 | 402_1 | AAtctctcaaaaTA |
| 403 | aaatctctcaaaat | 15882 | 15895 | 2-10-2 | 403_1 | AAatctctcaaaAT |
| 404 | taaatctctcaaaa | 15883 | 15896 | 2-10-2 | 404_1 | TAaatctctcaaAA |
| 405 | ttaaatctctcaaa | 15884 | 15897 | 2-10-2 | 405_1 | TTaaatctctcaAA |
| 406 | tttaaatctctcaa | 15885 | 15898 | 2-10-2 | 406_1 | TTtaaatctctcAA |
| 407 | ttttaaatctctca | 15886 | 15899 | 2-10-2 | 407_1 | TTttaaatctctCA |
| 408 | taatactttttcca | 16080 | 16093 | 2-10-2 | 408_1 | TAatactttttcCA |
| 409 | ttaatactttttcc | 16081 | 16094 | 2-10-2 | 409_1 | TTaatactttttCC |
| 410 | gttaatactttttc | 16082 | 16095 | 2-10-2 | 410_1 | GTtaatacttttTC |
| 411 | tgttaatacttttt | 16083 | 16096 | 2-10-2 | 411_1 | TGttaatactttTT |
| 412 | atgttaatactttt | 16084 | 16097 | 2-10-2 | 412_1 | ATgttaatacttTT |
| 413 | ttatcactaccaca | 16187 | 16200 | 2-10-2 | 413_1 | TTatcactaccaCA |
| 414 | tttatcactaccac | 16188 | 16201 | 2-10-2 | 414_1 | TTtatcactaccAC |
| 415 | atttatcactacca | 16189 | 16202 | 2-10-2 | 415_1 | ATttatcactacCA |
| 416 | catttatcactacc | 16190 | 16203 | 2-10-2 | 416_1 | CAtttatcactaCC |
| 417 | tcatttatcactac | 16191 | 16204 | 2-10-2 | 417_1 | TCatttatcactAC |
| 418 | atcatttatcacta | 16192 | 16205 | 2-10-2 | 418_1 | ATcatttatcacTA |
| 419 | catcatttatcact | 16193 | 16206 | 2-10-2 | 419_1 | CAtcatttatcaCT |
| 420 | acatcatttatcac | 16194 | 16207 | 2-10-2 | 420_1 | ACatcatttatcAC |
| 421 | aacatcatttatca | 16195 | 16208 | 2-10-2 | 421_1 | AAcatcatttatCA |
| 422 | taacatcatttatc | 16196 | 16209 | 2-10-2 | 422_1 | TAacatcatttaTC |
| 423 | ttaacatcatttat | 16197 | 16210 | 2-10-2 | 423_1 | TTaacatcatttAT |
| 424 | attaacatcattta | 16198 | 16211 | 2-10-2 | 424_1 | ATtaacatcattTA |
| 425 | aattaacatcattt | 16199 | 16212 | 2-10-2 | 425_1 | AAttaacatcatTT |
| 426 | taattaacatcatt | 16200 | 16213 | 2-10-2 | 426_1 | TAattaacatcaTT |
| 427 | ctaattaacatcat | 16201 | 16214 | 2-10-2 | 427_1 | CTaattaacatcAT |
| 428 | cctaattaacatca | 16202 | 16215 | 2-10-2 | 428_1 | CCtaattaacatCA |
| 429 | ccctaattaacatc | 16203 | 16216 | 2-10-2 | 429_1 | CCctaattaacaTC |
| 430 | gccctaattaacat | 16204 | 16217 | 2-10-2 | 430_1 | GCcctaattaacAT |
| 431 | ggccctaattaaca | 16205 | 16218 | 2-10-2 | 431_1 | GGccctaattaaCA |
| 432 | cggccctaattaac | 16206 | 16219 | 2-10-2 | 432_1 | CGgccctaattaAC |
| 433 | aaacacattttttt | 16494 | 16507 | 2-10-2 | 433_1 | AAacacatttttTT |
| 434 | taaacacatttttt | 16495 | 16508 | 2-10-2 | 434_1 | TAaacacattttTT |
| 435 | ataaacacattttt | 16496 | 16509 | 2-10-2 | 435_1 | ATaaacacatttTT |
| 436 | tataaacacatttt | 16497 | 16510 | 2-10-2 | 436_1 | TAtaaacacattTT |
| 437 | atataaacacattt | 16498 | 16511 | 2-10-2 | 437_1 | ATataaacacatTT |
| 438 | catataaacacatt | 16499 | 16512 | 2-10-2 | 438_1 | CAtataaacacaTT |
| 439 | acatataaacacat | 16500 | 16513 | 2-10-2 | 439_1 | ACatataaacacAT |
| 440 | aacatataaacaca | 16501 | 16514 | 2-10-2 | 440_1 | AAcatataaacaCA |
| 441 | taacatataaacac | 16502 | 16515 | 2-10-2 | 441_1 | TAacatataaacAC |
| 442 | ataacatataaaca | 16503 | 16516 | 2-10-2 | 442_1 | ATaacatataaaCA |
| 443 | tataacatataaac | 16504 | 16517 | 2-10-2 | 443_1 | TAtaacatataaAC |
| 444 | atataacatataaa | 16505 | 16518 | 2-10-2 | 444_1 | ATataacatataAA |
| 445 | catataacatataa | 16506 | 16519 | 2-10-2 | 445_1 | CAtataacatatAA |
| 446 | acatataacatata | 16507 | 16520 | 2-10-2 | 446_1 | ACatataacataTA |
| 447 | cacatataacatat | 16508 | 16521 | 2-10-2 | 447_1 | CAcatataacatAT |
| 448 | tcacatataacata | 16509 | 16522 | 2-10-2 | 448_1 | TCacatataacaTA |
| 449 | atcacatataacat | 16510 | 16523 | 2-10-2 | 449_1 | ATcacatataacAT |
| 450 | tatcacatataaca | 16511 | 16524 | 2-10-2 | 450_1 | TAtcacatataaCA |
| 451 | ctatcacatataac | 16512 | 16525 | 2-10-2 | 451_1 | CTatcacatataAC |
| 452 | actatcacatataa | 16513 | 16526 | 2-10-2 | 452_1 | ACtatcacatatAA |
| 453 | cactatcacatata | 16514 | 16527 | 2-10-2 | 453_1 | CActatcacataTA |
| 454 | gtccaacataactc | 16834 | 16847 | 2-10-2 | 454_1 | GTccaacataacTC |
| 455 | agtccaacataact | 16835 | 16848 | 2-10-2 | 455_1 | AGtccaacataaCT |
| 456 | cagtccaacataac | 16836 | 16849 | 2-10-2 | 456_1 | CAgtccaacataAC |
| 457 | tcagtccaacataa | 16837 | 16850 | 2-10-2 | 457_1 | TCagtccaacatAA |
| 458 | atcagtccaacata | 16838 | 16851 | 2-10-2 | 458_1 | ATcagtccaacaTA |
| 459 | tatcagtccaacat | 16839 | 16852 | 2-10-2 | 459_1 | TAtcagtccaacAT |
| 460 | aaaccctcccaaaa | 16921 | 16934 | 2-10-2 | 460_1 | AAaccctcccaaAA |
| 461 | taaaccctcccaaa | 16922 | 16935 | 2-10-2 | 461_1 | TAaaccctcccaAA |
| 462 | ttaaaccctcccaa | 16923 | 16936 | 2-10-2 | 462_1 | TTaaaccctcccAA |
| 463 | attaaaccctccca | 16924 | 16937 | 2-10-2 | 463_1 | ATtaaaccctccCA |
| 464 | cattaaaccctccc | 16925 | 16938 | 2-10-2 | 464_1 | CAttaaaccctcCC |
| 465 | acattaaaccctcc | 16926 | 16939 | 2-10-2 | 465_1 | ACattaaaccctCC |
| 466 | aacattaaaccctc | 16927 | 16940 | 2-10-2 | 466_1 | AAcattaaacccTC |
| 467 | aaacattaaaccct | 16928 | 16941 | 2-10-2 | 467_1 | AAacattaaaccCT |
| 468 | taaacattaaaccc | 16929 | 16942 | 2-10-2 | 468_1 | TAaacattaaacCC |
| 469 | ataaacattaaacc | 16930 | 16943 | 2-10-2 | 469_1 | ATaaacattaaaCC |
| 470 | tataaacattaaac | 16931 | 16944 | 2-10-2 | 470_1 | TAtaaacattaaAC |
| 471 | ctataaacattaaa | 16932 | 16945 | 2-10-2 | 471_1 | CTataaacattaAA |
| 472 | actataaacattaa | 16933 | 16946 | 2-10-2 | 472_1 | ACtataaacattAA |
| 473 | aactataaacatta | 16934 | 16947 | 2-10-2 | 473_1 | AActataaacatTA |
| 474 | aaactataaacatt | 16935 | 16948 | 2-10-2 | 474_1 | AAactataaacaTT |
| 475 | taaactataaacat | 16936 | 16949 | 2-10-2 | 475_1 | TAaactataaacAT |
| 476 | ttaaactataaaca | 16937 | 16950 | 2-10-2 | 476_1 | TTaaactataaaCA |
| 477 | tttaaactataaac | 16938 | 16951 | 2-10-2 | 477_1 | TTtaaactataaAC |
| 478 | ctttaaactataaa | 16939 | 16952 | 2-10-2 | 478_1 | CTttaaactataAA |
| 479 | gctttaaactataa | 16940 | 16953 | 2-10-2 | 479_1 | GCtttaaactatAA |
| 480 | tgctttaaactata | 16941 | 16954 | 2-10-2 | 480_1 | TGctttaaactaTA |
| 481 | cagcctatcaccac | 18018 | 18031 | 2-10-2 | 481_1 | CAgcctatcaccAC |
| 482 | acagcctatcacca | 18019 | 18032 | 2-10-2 | 482_1 | ACagcctatcacCA |
| 483 | cacagcctatcacc | 18020 | 18033 | 2-10-2 | 483_1 | CAcagcctatcaCC |
| 484 | tcacagcctatcac | 18021 | 18034 | 2-10-2 | 484_1 | TCacagcctatcAC |
| 485 | atcacagcctatca | 18022 | 18035 | 2-10-2 | 485_1 | ATcacagcctatCA |
| 486 | aatcacagcctatc | 18023 | 18036 | 2-10-2 | 486_1 | AAtcacagcctaTC |
| 487 | aaatcacagcctat | 18024 | 18037 | 2-10-2 | 487_1 | AAatcacagcctAT |
| 488 | caaatcacagccta | 18025 | 18038 | 2-10-2 | 488_1 | CAaatcacagccTA |
| 489 | ccaaatcacagcct | 18026 | 18039 | 2-10-2 | 489_1 | CCaaatcacagcCT |
| 490 | cccaaatcacagcc | 18027 | 18040 | 2-10-2 | 490_1 | CCcaaatcacagCC |
| 491 | acccaaatcacagc | 18028 | 18041 | 2-10-2 | 491_1 | ACccaaatcacaGC |
| 492 | cacccaaatcacag | 18029 | 18042 | 2-10-2 | 492_1 | CAcccaaatcacAG |
| 493 | tcacccaaatcaca | 18030 | 18043 | 2-10-2 | 493_1 | TCacccaaatcaCA |
| 494 | gtcacccaaatcac | 18031 | 18044 | 2-10-2 | 494_1 | GTcacccaaatcAC |
| 495 | cgtcacccaaatca | 18032 | 18045 | 2-10-2 | 495_1 | CGtcacccaaatCA |
| 496 | gcgtcacccaaatc | 18033 | 18046 | 2-10-2 | 496_1 | GCgtcacccaaaTC |
| 497 | agcgtcacccaaat | 18034 | 18047 | 2-10-2 | 497_1 | AGcgtcacccaaAT |
| 498 | atcctaaaatcact | 18630 | 18643 | 2-10-2 | 498_1 | ATcctaaaatcaCT |
| 499 | gatcctaaaatcac | 18631 | 18644 | 2-10-2 | 499_1 | GAtcctaaaatcAC |
| 500 | agatcctaaaatca | 18632 | 18645 | 2-10-2 | 500_1 | AGatcctaaaatCA |
| 501 | cagatcctaaaatc | 18633 | 18646 | 2-10-2 | 501_1 | CAgatcctaaaaTC |
| 502 | tcagatcctaaaat | 18634 | 18647 | 2-10-2 | 502_1 | TCagatcctaaaAT |
| 503 | aaaccaatcatcat | 19107 | 19120 | 2-10-2 | 503_1 | AAaccaatcatcAT |
| 504 | aaaaccaatcatca | 19108 | 19121 | 2-10-2 | 504_1 | AAaaccaatcatCA |
| 505 | taaaaccaatcatc | 19109 | 19122 | 2-10-2 | 505_1 | TAaaaccaatcaTC |
| 506 | gtaaaaccaatcat | 19110 | 19123 | 2-10-2 | 506_1 | GTaaaaccaatcAT |
| 507 | agtaaaaccaatca | 19111 | 19124 | 2-10-2 | 507_1 | AGtaaaaccaatCA |
| 508 | aagtaaaaccaatc | 19112 | 19125 | 2-10-2 | 508_1 | AAgtaaaaccaaTC |
| 509 | aaagtaaaaccaat | 19113 | 19126 | 2-10-2 | 509_1 | AAagtaaaaccaAT |
| 510 | catctctactaaaa | 20214 | 20227 | 2-10-2 | 510_1 | CAtctctactaaAA |
| 511 | ccatctctactaaa | 20215 | 20228 | 2-10-2 | 511_1 | CCatctctactaAA |
| 512 | tccatctctactaa | 20216 | 20229 | 2-10-2 | 512_1 | TCcatctctactAA |
| 513 | ttccatctctacta | 20217 | 20230 | 2-10-2 | 513_1 | TTccatctctacTA |
| 514 | cttccatctctact | 20218 | 20231 | 2-10-2 | 514_1 | CTtccatctctaCT |
| 515 | ccttccatctctac | 20219 | 20232 | 2-10-2 | 515_1 | CCttccatctctAC |
| 516 | cccttccatctcta | 20220 | 20233 | 2-10-2 | 516_1 | CCcttccatctcTA |
| 517 | acataacaaaccca | 20555 | 20568 | 2-10-2 | 517_1 | ACataacaaaccCA |
| 518 | tacataacaaaccc | 20556 | 20569 | 2-10-2 | 518_1 | TAcataacaaacCC |
| 519 | ctacataacaaacc | 20557 | 20570 | 2-10-2 | 519_1 | CTacataacaaaCC |
| 520 | actacataacaaac | 20558 | 20571 | 2-10-2 | 520_1 | ACtacataacaaAC |
| 521 | aactacataacaaa | 20559 | 20572 | 2-10-2 | 521_1 | AActacataacaAA |
| 522 | taactacataacaa | 20560 | 20573 | 2-10-2 | 522_1 | TAactacataacAA |
| 523 | ataactacataaca | 20561 | 20574 | 2-10-2 | 523_1 | ATaactacataaCA |
| 524 | aataactacataac | 20562 | 20575 | 2-10-2 | 524_1 | AAtaactacataAC |
| 525 | caataactacataa | 20563 | 20576 | 2-10-2 | 525_1 | CAataactacatAA |
| 526 | acaataactacata | 20564 | 20577 | 2-10-2 | 526_1 | ACaataactacaTA |
| 527 | cacaataactacat | 20565 | 20578 | 2-10-2 | 527_1 | CAcaataactacAT |
| 528 | tcacaataactaca | 20566 | 20579 | 2-10-2 | 528_1 | TCacaataactaCA |
| 529 | ttcacaataactac | 20567 | 20580 | 2-10-2 | 529_1 | TTcacaataactAC |
| 530 | attcacaataacta | 20568 | 20581 | 2-10-2 | 530_1 | ATtcacaataacTA |
| 531 | aattcacaataact | 20569 | 20582 | 2-10-2 | 531_1 | AAttcacaataaCT |
| 532 | gaattcacaataac | 20570 | 20583 | 2-10-2 | 532_1 | GAattcacaataAC |
| 533 | tgaattcacaataa | 20571 | 20584 | 2-10-2 | 533_1 | TGaattcacaatAA |
| 534 | ctaaaacaatctaa | 22073 | 22086 | 2-10-2 | 534_1 | CTaaaacaatctAA |
| 535 | cctaaaacaatcta | 22074 | 22087 | 2-10-2 | 535_1 | CCtaaaacaatcTA |
| 536 | acctaaaacaatct | 22075 | 22088 | 2-10-2 | 536_1 | ACctaaaacaatCT |
| 537 | tacctaaaacaatc | 22076 | 22089 | 2-10-2 | 537_1 | TAcctaaaacaaTC |
| 538 | atacctaaaacaat | 22077 | 22090 | 2-10-2 | 538_1 | ATacctaaaacaAT |
| 539 | tatacctaaaacaa | 22078 | 22091 | 2-10-2 | 539_1 | TAtacctaaaacAA |
| 540 | ctatacctaaaaca | 22079 | 22092 | 2-10-2 | 540_1 | CTatacctaaaaCA |
| 541 | gctatacctaaaac | 22080 | 22093 | 2-10-2 | 541_1 | GCtatacctaaaAC |
| 542 | ttgtaactaaaaat | 22254 | 22267 | 2-10-2 | 542_1 | TTgtaactaaaaAT |
| 543 | cttgtaactaaaaa | 22255 | 22268 | 2-10-2 | 543_1 | CTtgtaactaaaAA |
| 544 | ccttgtaactaaaa | 22256 | 22269 | 2-10-2 | 544_1 | CCttgtaactaaAA |
| 545 | cccttgtaactaaa | 22257 | 22270 | 2-10-2 | 545_1 | CCcttgtaactaAA |
| 546 | ccccttgtaactaa | 22258 | 22271 | 2-10-2 | 546_1 | CCccttgtaactAA |
| 547 | accccttgtaacta | 22259 | 22272 | 2-10-2 | 547_1 | ACcccttgtaacTA |
| 548 | caccccttgtaact | 22260 | 22273 | 2-10-2 | 548_1 | CAccccttgtaaCT |
| 549 | acaccccttgtaac | 22261 | 22274 | 2-10-2 | 549_1 | ACaccccttgtaAC |
| 550 | ttcatatatacatc | 22424 | 22437 | 2-10-2 | 550_1 | TTcatatatacaTC |
| 551 | cttcatatatacat | 22425 | 22438 | 2-10-2 | 551_1 | CTtcatatatacAT |
| 552 | ccttcatatataca | 22426 | 22439 | 2-10-2 | 552_1 | CCttcatatataCA |
| 553 | cccttcatatatac | 22427 | 22440 | 2-10-2 | 553_1 | CCcttcatatatAC |
| 554 | acccttcatatata | 22428 | 22441 | 2-10-2 | 554_1 | ACccttcatataTA |
| 555 | tacccttcatatat | 22429 | 22442 | 2-10-2 | 555_1 | TAcccttcatatAT |
| 556 | ttacccttcatata | 22430 | 22443 | 2-10-2 | 556_1 | TTacccttcataTA |
| 557 | attacccttcatat | 22431 | 22444 | 2-10-2 | 557_1 | ATtacccttcatAT |
| 558 | cattacccttcata | 22432 | 22445 | 2-10-2 | 558_1 | CAttacccttcaTA |
| 559 | acattacccttcat | 22433 | 22446 | 2-10-2 | 559_1 | ACattacccttcAT |
| 560 | tacattacccttca | 22434 | 22447 | 2-10-2 | 560_1 | TAcattacccttCA |
| 561 | tcttatacttacta | 23204 | 23217 | 2-10-2 | 561_1 | TCttatacttacTA |
| 562 | ttcttatacttact | 23205 | 23218 | 2-10-2 | 562_1 | TTcttatacttaCT |
| 563 | attcttatacttac | 23206 | 23219 | 2-10-2 | 563_1 | ATtcttatacttAC |
| 564 | gattcttatactta | 23207 | 23220 | 2-10-2 | 564_1 | GAttcttatactTA |
| 565 | tgattcttatactt | 23208 | 23221 | 2-10-2 | 565_1 | TGattcttatacTT |
| 566 | atgattcttatact | 23209 | 23222 | 2-10-2 | 566_1 | ATgattcttataCT |
| 567 | aacttcactaaaat | 23616 | 23629 | 2-10-2 | 567_1 | AActtcactaaaAT |
| 568 | aaacttcactaaaa | 23617 | 23630 | 2-10-2 | 568_1 | AAacttcactaaAA |
| 569 | taaacttcactaaa | 23618 | 23631 | 2-10-2 | 569_1 | TAaacttcactaAA |
| 570 | ataaacttcactaa | 23619 | 23632 | 2-10-2 | 570_1 | ATaaacttcactAA |
| 571 | aataaacttcacta | 23620 | 23633 | 2-10-2 | 571_1 | AAtaaacttcacTA |
| 572 | taataaacttcact | 23621 | 23634 | 2-10-2 | 572_1 | TAataaacttcaCT |
| 573 | ctaataaacttcac | 23622 | 23635 | 2-10-2 | 573_1 | CTaataaacttcAC |
| 574 | actaataaacttca | 23623 | 23636 | 2-10-2 | 574_1 | ACtaataaacttCA |
| 575 | aactaataaacttc | 23624 | 23637 | 2-10-2 | 575_1 | AActaataaactTC |
| 576 | aatcttctatttta | 24108 | 24121 | 2-10-2 | 576_1 | AAtcttctatttTA |
| 577 | caatcttctatttt | 24109 | 24122 | 2-10-2 | 577_1 | CAatcttctattTT |
| 578 | ccaatcttctattt | 24110 | 24123 | 2-10-2 | 578_1 | CCaatcttctatTT |
| 579 | accaatcttctatt | 24111 | 24124 | 2-10-2 | 579_1 | ACcaatcttctaTT |
| 580 | aaccaatcttctat | 24112 | 24125 | 2-10-2 | 580_1 | AAccaatcttctAT |
| 581 | caaccaatcttcta | 24113 | 24126 | 2-10-2 | 581_1 | CAaccaatcttcTA |
| 582 | gcaaccaatcttct | 24114 | 24127 | 2-10-2 | 582_1 | GCaaccaatcttCT |
| 583 | tgcaaccaatcttc | 24115 | 24128 | 2-10-2 | 583_1 | TGcaaccaatctTC |
| 584 | ctgcaaccaatctt | 24116 | 24129 | 2-10-2 | 584_1 | CTgcaaccaatcTT |
| 585 | actgcaaccaatct | 24117 | 24130 | 2-10-2 | 585_1 | ACtgcaaccaatCT |
| 586 | aactgcaaccaatc | 24118 | 24131 | 2-10-2 | 586_1 | AActgcaaccaaTC |
| 587 | taactgcaaccaat | 24119 | 24132 | 2-10-2 | 587_1 | TAactgcaaccaAT |
| 588 | tacaacacacatca | 24335 | 24348 | 2-10-2 | 588_1 | TAcaacacacatCA |
| 589 | atacaacacacatc | 24336 | 24349 | 2-10-2 | 589_1 | ATacaacacacaTC |
| 590 | aatacaacacacat | 24337 | 24350 | 2-10-2 | 590_1 | AAtacaacacacAT |
| 591 | gaatacaacacaca | 24338 | 24351 | 2-10-2 | 591_1 | GAatacaacacaCA |
| 592 | tgaatacaacacac | 24339 | 24352 | 2-10-2 | 592_1 | TGaatacaacacAC |
| 593 | atgaatacaacaca | 24340 | 24353 | 2-10-2 | 593_1 | ATgaatacaacaCA |
| 594 | cctaataaaatata | 24499 | 24512 | 2-10-2 | 594_1 | CCtaataaaataTA |
| 595 | tcctaataaaatat | 24500 | 24513 | 2-10-2 | 595_1 | TCctaataaaatAT |
| 596 | ctcctaataaaata | 24501 | 24514 | 2-10-2 | 596_1 | CTcctaataaaaTA |
| 597 | actcctaataaaat | 24502 | 24515 | 2-10-2 | 597_1 | ACtcctaataaaAT |
| 598 | tactcctaataaaa | 24503 | 24516 | 2-10-2 | 598_1 | TActcctaataaAA |
| 599 | ctactcctaataaa | 24504 | 24517 | 2-10-2 | 599_1 | CTactcctaataAA |
| 600 | actactcctaataa | 24505 | 24518 | 2-10-2 | 600_1 | ACtactcctaatAA |
| 601 | aactactcctaata | 24506 | 24519 | 2-10-2 | 601_1 | AActactcctaaTA |
| 602 | taactactcctaat | 24507 | 24520 | 2-10-2 | 602_1 | TAactactcctaAT |
| 603 | ataactactcctaa | 24508 | 24521 | 2-10-2 | 603_1 | ATaactactcctAA |
| 604 | tataactactccta | 24509 | 24522 | 2-10-2 | 604_1 | TAtaactactccTA |
| 605 | atataactactcct | 24510 | 24523 | 2-10-2 | 605_1 | ATataactactcCT |
| 606 | aatataactactcc | 24511 | 24524 | 2-10-2 | 606_1 | AAtataactactCC |
| 607 | aaatataactactc | 24512 | 24525 | 2-10-2 | 607_1 | AAatataactacTC |
| 608 | aaaatataactact | 24513 | 24526 | 2-10-2 | 608_1 | AAaatataactaCT |
| 609 | aaaaatataactac | 24514 | 24527 | 2-10-2 | 609_1 | AAaaatataactAC |
| 610 | taaaaatataacta | 24515 | 24528 | 2-10-2 | 610_1 | TAaaaatataacTA |
| 611 | gtaaaaatataact | 24516 | 24529 | 2-10-2 | 611_1 | GTaaaaatataaCT |
| 612 | agtaaaaatataac | 24517 | 24530 | 2-10-2 | 612_1 | AGtaaaaatataAC |
| 613 | actgatacccacaa | 24593 | 24606 | 2-10-2 | 613_1 | ACtgatacccacAA |
| 614 | aactgatacccaca | 24594 | 24607 | 2-10-2 | 614_1 | AActgatacccaCA |
| 615 | caactgatacccac | 24595 | 24608 | 2-10-2 | 615_1 | CAactgatacccAC |
| 616 | tcaactgataccca | 24596 | 24609 | 2-10-2 | 616_1 | TCaactgataccCA |
| 617 | atcactaaaaaact | 24752 | 24765 | 2-10-2 | 617_1 | ATcactaaaaaaCT |
| 618 | tatcactaaaaaac | 24753 | 24766 | 2-10-2 | 618_1 | TAtcactaaaaaAC |
| 619 | atatcactaaaaaa | 24754 | 24767 | 2-10-2 | 619_1 | ATatcactaaaaAA |
| 620 | tatatcactaaaaa | 24755 | 24768 | 2-10-2 | 620_1 | TAtatcactaaaAA |
| 621 | ttatatcactaaaa | 24756 | 24769 | 2-10-2 | 621_1 | TTatatcactaaAA |
| 622 | tttatatcactaaa | 24757 | 24770 | 2-10-2 | 622_1 | TTtatatcactaAA |
| 623 | gtttatatcactaa | 24758 | 24771 | 2-10-2 | 623_1 | GTttatatcactAA |
| 624 | aaacttttaattaa | 24850 | 24863 | 2-10-2 | 624_1 | AAacttttaattAA |
| 625 | caaacttttaatta | 24851 | 24864 | 2-10-2 | 625_1 | CAaacttttaatTA |
| 626 | tcaaacttttaatt | 24852 | 24865 | 2-10-2 | 626_1 | TCaaacttttaaTT |
| 627 | ttcaaacttttaat | 24853 | 24866 | 2-10-2 | 627_1 | TTcaaacttttaAT |
| 628 | cttcaaacttttaa | 24854 | 24867 | 2-10-2 | 628_1 | CTtcaaacttttAA |
| 629 | acttcaaactttta | 24855 | 24868 | 2-10-2 | 629_1 | ACttcaaactttTA |
| 630 | cacttcaaactttt | 24856 | 24869 | 2-10-2 | 630_1 | CActtcaaacttTT |
| 631 | ccacttcaaacttt | 24857 | 24870 | 2-10-2 | 631_1 | CCacttcaaactTT |
| 632 | cccacttcaaactt | 24858 | 24871 | 2-10-2 | 632_1 | CCcacttcaaacTT |
| 633 | acccacttcaaact | 24859 | 24872 | 2-10-2 | 633_1 | ACccacttcaaaCT |
| 634 | aacccacttcaaac | 24860 | 24873 | 2-10-2 | 634_1 | AAcccacttcaaAC |
| 635 | aaacccacttcaaa | 24861 | 24874 | 2-10-2 | 635_1 | AAacccacttcaAA |
| 636 | aaaacccacttcaa | 24862 | 24875 | 2-10-2 | 636_1 | AAaacccacttcAA |
| 637 | aaaaacccacttca | 24863 | 24876 | 2-10-2 | 637_1 | AAaaacccacttCA |
| 638 | aaaaaacccacttc | 24864 | 24877 | 2-10-2 | 638_1 | AAaaaacccactTC |
| 639 | caaaaaacccactt | 24865 | 24878 | 2-10-2 | 639_1 | CAaaaaacccacTT |
| 640 | acaaaaaacccact | 24866 | 24879 | 2-10-2 | 640_1 | ACaaaaaacccaCT |
| 641 | aacaaaaaacccac | 24867 | 24880 | 2-10-2 | 641_1 | AAcaaaaaacccAC |
| 642 | aaacaaaaaaccca | 24868 | 24881 | 2-10-2 | 642_1 | AAacaaaaaaccCA |
| 643 | aaaacaaaaaaccc | 24869 | 24882 | 2-10-2 | 643_1 | AAaacaaaaaacCC |
| 644 | atcttcccattaat | 24976 | 24989 | 2-10-2 | 644_1 | ATcttcccattaAT |
| 645 | aatcttcccattaa | 24977 | 24990 | 2-10-2 | 645_1 | AAtcttcccattAA |
| 646 | taatcttcccatta | 24978 | 24991 | 2-10-2 | 646_1 | TAatcttcccatTA |
| 647 | ataatcttcccatt | 24979 | 24992 | 2-10-2 | 647_1 | ATaatcttcccaTT |
| 648 | aataatcttcccat | 24980 | 24993 | 2-10-2 | 648_1 | AAtaatcttcccAT |
| 649 | aaataatcttccca | 24981 | 24994 | 2-10-2 | 649_1 | AAataatcttccCA |
| 650 | aaaataatcttccc | 24982 | 24995 | 2-10-2 | 650_1 | AAaataatcttcCC |
| 651 | tattaatcaaaaat | 25057 | 25070 | 2-10-2 | 651_1 | TAttaatcaaaaAT |
| 652 | ctattaatcaaaaa | 25058 | 25071 | 2-10-2 | 652_1 | CTattaatcaaaAA |
| 653 | tctattaatcaaaa | 25059 | 25072 | 2-10-2 | 653_1 | TCtattaatcaaAA |
| 654 | ctctattaatcaaa | 25060 | 25073 | 2-10-2 | 654_1 | CTctattaatcaAA |
| 655 | actctattaatcaa | 25061 | 25074 | 2-10-2 | 655_1 | ACtctattaatcAA |
| 656 | gactctattaatca | 25062 | 25075 | 2-10-2 | 656_1 | GActctattaatCA |
| 657 | tattctactcttct | 25433 | 25446 | 2-10-2 | 657_1 | TAttctactcttCT |
| 658 | atattctactcttc | 25434 | 25447 | 2-10-2 | 658_1 | ATattctactctTC |
| 659 | aatattctactctt | 25435 | 25448 | 2-10-2 | 659_1 | AAtattctactcTT |
| 660 | gaatattctactct | 25436 | 25449 | 2-10-2 | 660_1 | GAatattctactCT |
| 661 | agaatattctactc | 25437 | 25450 | 2-10-2 | 661_1 | AGaatattctacTC |
| 662 | atttaccaattcaa | 25508 | 25521 | 2-10-2 | 662_1 | ATttaccaattcAA |
| 663 | tatttaccaattca | 25509 | 25522 | 2-10-2 | 663_1 | TAtttaccaattCA |
| 664 | gtatttaccaattc | 25510 | 25523 | 2-10-2 | 664_1 | GTatttaccaatTC |
| 665 | tgtatttaccaatt | 25511 | 25524 | 2-10-2 | 665_1 | TGtatttaccaaTT |
| 666 | ctgtatttaccaat | 25512 | 25525 | 2-10-2 | 666_1 | CTgtatttaccaAT |
| 667 | actgtatttaccaa | 25513 | 25526 | 2-10-2 | 667_1 | ACtgtatttaccAA |
| 668 | ttataccatcaaat | 27100 | 27113 | 2-10-2 | 668_1 | TTataccatcaaAT |
| 669 | attataccatcaaa | 27101 | 27114 | 2-10-2 | 669_1 | ATtataccatcaAA |
| 670 | cattataccatcaa | 27102 | 27115 | 2-10-2 | 670_1 | CAttataccatcAA |
| 671 | tcattataccatca | 27103 | 27116 | 2-10-2 | 671_1 | TCattataccatCA |
| 672 | ttcattataccatc | 27104 | 27117 | 2-10-2 | 672_1 | TTcattataccaTC |
| 673 | cttcattataccat | 27105 | 27118 | 2-10-2 | 673_1 | CTtcattataccAT |
| 674 | tcttcattatacca | 27106 | 27119 | 2-10-2 | 674_1 | TCttcattatacCA |
| 675 | ttcttcattatacc | 27107 | 27120 | 2-10-2 | 675_1 | TTcttcattataCC |
| 676 | tttcttcattatac | 27108 | 27121 | 2-10-2 | 676_1 | TTtcttcattatAC |
| 677 | ttttcttcattata | 27109 | 27122 | 2-10-2 | 677_1 | TTttcttcattaTA |
| 678 | attttcttcattat | 27110 | 27123 | 2-10-2 | 678_1 | ATtttcttcattAT |
| 679 | tattttcttcatta | 27111 | 27124 | 2-10-2 | 679_1 | TAttttcttcatTA |
| 680 | atattttcttcatt | 27112 | 27125 | 2-10-2 | 680_1 | ATattttcttcaTT |
| 681 | aatattttcttcat | 27113 | 27126 | 2-10-2 | 681_1 | AAtattttcttcAT |
| 682 | aaatattttcttca | 27114 | 27127 | 2-10-2 | 682_1 | AAatattttcttCA |
| 683 | taaatattttcttc | 27115 | 27128 | 2-10-2 | 683_1 | TAaatattttctTC |
| 684 | aataatccaaactt | 27772 | 27785 | 2-10-2 | 684_1 | AAtaatccaaacTT |
| 685 | aaataatccaaact | 27773 | 27786 | 2-10-2 | 685_1 | AAataatccaaaCT |
| 686 | aaaataatccaaac | 27774 | 27787 | 2-10-2 | 686_1 | AAaataatccaaAC |
| 687 | caaaataatccaaa | 27775 | 27788 | 2-10-2 | 687_1 | CAaaataatccaAA |
| 688 | acaaaataatccaa | 27776 | 27789 | 2-10-2 | 688_1 | ACaaaataatccAA |
| 689 | tacaaaataatcca | 27777 | 27790 | 2-10-2 | 689_1 | TAcaaaataatcCA |
| 690 | ttacaaaataatcc | 27778 | 27791 | 2-10-2 | 690_1 | TTacaaaataatCC |
| 691 | gttacaaaataatc | 27779 | 27792 | 2-10-2 | 691_1 | GTtacaaaataaTC |
| 692 | tgttacaaaataat | 27780 | 27793 | 2-10-2 | 692_1 | TGttacaaaataAT |
| 693 | ttttacattaacta | 27935 | 27948 | 2-10-2 | 693_1 | TTttacattaacTA |
| 694 | tttttacattaact | 27936 | 27949 | 2-10-2 | 694_1 | TTIttacattaaCT |
| 695 | ttttttacattaac | 27937 | 27950 | 2-10-2 | 695_1 | TTttttacattaAC |
| 696 | attttttacattaa | 27938 | 27951 | 2-10-2 | 696_1 | ATtttttacattAA |
| 697 | tattttttacatta | 27939 | 27952 | 2-10-2 | 697_1 | TAttttttacatTA |
| 698 | ttattttttacatt | 27940 | 27953 | 2-10-2 | 698_1 | TTattttttacaTT |
| 699 | aaatactaacatca | 29299 | 29312 | 2-10-2 | 699_1 | AAatactaacatCA |
| 700 | aaaatactaacatc | 29300 | 29313 | 2-10-2 | 700_1 | AAaatactaacaTC |
| 701 | caaaatactaacat | 29301 | 29314 | 2-10-2 | 701_1 | CAaaatactaacAT |
| 702 | ccaaaatactaaca | 29302 | 29315 | 2-10-2 | 702_1 | CCaaaatactaaCA |
| 703 | gccaaaatactaac | 29303 | 29316 | 2-10-2 | 703_1 | GCcaaaatactaAC |
| 704 | tgccaaaatactaa | 29304 | 29317 | 2-10-2 | 704_1 | TGccaaaatactAA |
| 705 | tccattcattttat | 29415 | 29428 | 2-10-2 | 705_1 | TCcattcattttAT |
| 706 | atccattcatttta | 29416 | 29429 | 2-10-2 | 706_1 | ATccattcatttTA |
| 707 | catccattcatttt | 29417 | 29430 | 2-10-2 | 707_1 | CAtccattcattTT |
| 708 | acatccattcattt | 29418 | 29431 | 2-10-2 | 708_1 | ACatccattcatTT |
| 709 | cacatccattcatt | 29419 | 29432 | 2-10-2 | 709_1 | CAcatccattcaTT |
| 710 | ccacatccattcat | 29420 | 29433 | 2-10-2 | 710_1 | CCacatccattcAT |
| 711 | gccacatccattca | 29421 | 29434 | 2-10-2 | 711_1 | GCcacatccattCA |
| 712 | tgccacatccattc | 29422 | 29435 | 2-10-2 | 712_1 | TGccacatccatTC |
| 713 | atgccacatccatt | 29423 | 29436 | 2-10-2 | 713_1 | ATgccacatccaTT |
| 714 | tatgccacatccat | 29424 | 29437 | 2-10-2 | 714_1 | TAtgccacatccAT |
| 715 | ttatgccacatcca | 29425 | 29438 | 2-10-2 | 715_1 | TTatgccacatcCA |
| 716 | attatgccacatcc | 29426 | 29439 | 2-10-2 | 716_1 | ATtatgccacatCC |
| 717 | tcttaactcttctc | 30753 | 30766 | 2-10-2 | 717_1 | TCttaactcttcTC |
| 718 | ttcttaactcttct | 30754 | 30767 | 2-10-2 | 718_1 | TTcttaactcttCT |
| 719 | gttcttaactcttc | 30755 | 30768 | 2-10-2 | 719_1 | GTtcttaactctTC |
| 720 | agttcttaactctt | 30756 | 30769 | 2-10-2 | 720_1 | AGttcttaactcTT |
| 721 | tagttcttaactct | 30757 | 30770 | 2-10-2 | 721_1 | TAgttcttaactCT |
| 722 | caaatactcaaaaa | 31029 | 31042 | 2-10-2 | 722_1 | CAaatactcaaaAA |
| 723 | tcaaatactcaaaa | 31030 | 31043 | 2-10-2 | 723_1 | TCaaatactcaaAA |
| 724 | ttcaaatactcaaa | 31031 | 31044 | 2-10-2 | 724_1 | TTcaaatactcaAA |
| 725 | cttcaaatactcaa | 31032 | 31045 | 2-10-2 | 725_1 | CTtcaaatactcAA |
| 726 | gcttcaaatactca | 31033 | 31046 | 2-10-2 | 726_1 | GCttcaaatactCA |
| 727 | agcttcaaatactc | 31034 | 31047 | 2-10-2 | 727_1 | AGcttcaaatacTC |
| 728 | aagcttcaaatact | 31035 | 31048 | 2-10-2 | 728_1 | AAgcttcaaataCT |
| 729 | cctcattacccatt | 32059 | 32072 | 2-10-2 | 729_1 | CCtcattacccaTT |
| 730 | tcctcattacccat | 32060 | 32073 | 2-10-2 | 730_1 | TCctcattacccAT |
| 731 | atcctcattaccca | 32061 | 32074 | 2-10-2 | 731_1 | ATcctcattaccCA |
| 732 | tatcctcattaccc | 32062 | 32075 | 2-10-2 | 732_1 | TAtcctcattacCC |
| 733 | atatcctcattacc | 32063 | 32076 | 2-10-2 | 733_1 | ATatcctcattaCC |
| 734 | aatatcctcattac | 32064 | 32077 | 2-10-2 | 734_1 | AAtatcctcattAC |
| 735 | taatatcctcatta | 32065 | 32078 | 2-10-2 | 735_1 | TAatatcctcatTA |
| 736 | ttaatatcctcatt | 32066 | 32079 | 2-10-2 | 736_1 | TTaatatcctcaTT |
| 737 | tttaatatcctcat | 32067 | 32080 | 2-10-2 | 737_1 | TTtaatatcctcAT |
| 738 | atttaatatcctca | 32068 | 32081 | 2-10-2 | 738_1 | ATttaatatcctCA |
| 739 | aatttaatatcctc | 32069 | 32082 | 2-10-2 | 739_1 | AAtttaatatccTC |
| 740 | aaatttaatatcct | 32070 | 32083 | 2-10-2 | 740_1 | AAatttaatatcCT |
| 741 | taaatttaatatcc | 32071 | 32084 | 2-10-2 | 741_1 | TAaatttaatatCC |
| 742 | ttaaatttaatatc | 32072 | 32085 | 2-10-2 | 742_1 | TTaaatttaataTC |
| 743 | cttaaatttaatat | 32073 | 32086 | 2-10-2 | 743_1 | CTtaaatttaatAT |
| 744 | tcttaaatttaata | 32074 | 32087 | 2-10-2 | 744_1 | TCttaaatttaaTA |
| 745 | ttcttaaatttaat | 32075 | 32088 | 2-10-2 | 745_1 | TTcttaaatttaAT |
| 746 | gttcttaaatttaa | 32076 | 32089 | 2-10-2 | 746_1 | GTtcttaaatttAA |
| 747 | ttattctactttta | 33431 | 33444 | 2-10-2 | 747_1 | TTattctactttTA |
| 748 | tttattctactttt | 33432 | 33445 | 2-10-2 | 748_1 | TTtattctacttTT |
| 749 | ctttattctacttt | 33433 | 33446 | 2-10-2 | 749_1 | CTttattctactTT |
| 750 | cctttattctactt | 33434 | 33447 | 2-10-2 | 750_1 | CCtttattctacTT |
| 751 | gcctttattctact | 33435 | 33448 | 2-10-2 | 751_1 | GCctttattctaCT |
| 752 | aacaattattaata | 33797 | 33810 | 2-10-2 | 752_1 | AAcaattattaaTA |
| 753 | caacaattattaat | 33798 | 33811 | 2-10-2 | 753_1 | CAacaattattaAT |
| 754 | gcaacaattattaa | 33799 | 33812 | 2-10-2 | 754_1 | GCaacaattattAA |
| 755 | agcaacaattatta | 33800 | 33813 | 2-10-2 | 755_1 | AGcaacaattatTA |
| 756 | cagcaacaattatt | 33801 | 33814 | 2-10-2 | 756_1 | CAgcaacaattaTT |
| 757 | ccagcaacaattat | 33802 | 33815 | 2-10-2 | 757_1 | CCagcaacaattAT |
| 758 | accagcaacaatta | 33803 | 33816 | 2-10-2 | 758_1 | ACcagcaacaatTA |
| 759 | aaaccaaaacttac | 33963 | 33976 | 2-10-2 | 759_1 | AAaccaaaacttAC |
| 760 | aaaaccaaaactta | 33964 | 33977 | 2-10-2 | 760_1 | AAaaccaaaactTA |
| 761 | aaaaaccaaaactt | 33965 | 33978 | 2-10-2 | 761_1 | AAaaaccaaaacTT |
| 762 | caaaaaccaaaact | 33966 | 33979 | 2-10-2 | 762_1 | CAaaaaccaaaaCT |
| 763 | ccaaaaaccaaaac | 33967 | 33980 | 2-10-2 | 763_1 | CCaaaaaccaaaAC |
| 764 | accaaaaaccaaaa | 33968 | 33981 | 2-10-2 | 764_1 | ACcaaaaaccaaAA |
| 765 | aaccaaaaaccaaa | 33969 | 33982 | 2-10-2 | 765_1 | AAccaaaaaccaA |
| | | | | | | A |
| 766 | aaaccaaaaaccaa | 33970 | 33983 | 2-10-2 | 766_1 | AAaccaaaaaccA |
| | | | | | | A |
| 767 | atctaaaacacttc | 34050 | 34063 | 2-10-2 | 767_1 | ATctaaaacactTC |
| 768 | aatctaaaacactt | 34051 | 34064 | 2-10-2 | 768_1 | AAtctaaaacacTT |
| 769 | aaatctaaaacact | 34052 | 34065 | 2-10-2 | 769_1 | AAatctaaaacaCT |
| 770 | caaatctaaaacac | 34053 | 34066 | 2-10-2 | 770_1 | CAaatctaaaacAC |
| 771 | ccaaatctaaaaca | 34054 | 34067 | 2-10-2 | 771_1 | CCaaatctaaaaCA |
| 772 | cccaaatctaaaac | 34055 | 34068 | 2-10-2 | 772_1 | CCcaaatctaaaAC |
| 773 | ccccaaatctaaaa | 34056 | 34069 | 2-10-2 | 773_1 | CCccaaatctaaAA |
| 774 | accccaaatctaaa | 34057 | 34070 | 2-10-2 | 774_1 | ACcccaaatctaAA |
| 775 | aaccccaaatctaa | 34058 | 34071 | 2-10-2 | 775_1 | AAccccaaatctAA |
| 776 | aaaccccaaatcta | 34059 | 34072 | 2-10-2 | 776_1 | AAaccccaaatcTA |
| 777 | attcacaaatccta | 34075 | 34088 | 2-10-2 | 777_1 | ATtcacaaatccTA |
| 778 | tattcacaaatcct | 34076 | 34089 | 2-10-2 | 778_1 | TAttcacaaatcCT |
| 779 | atattcacaaatcc | 34077 | 34090 | 2-10-2 | 779_1 | ATattcacaaatCC |
| 780 | aatattcacaaatc | 34078 | 34091 | 2-10-2 | 780_1 | AAtattcacaaaTC |
| 781 | aaatattcacaaat | 34079 | 34092 | 2-10-2 | 781_1 | AAatattcacaaAT |
| 782 | caaatattcacaaa | 34080 | 34093 | 2-10-2 | 782_1 | CAaatattcacaAA |
| 783 | gcaaatattcacaa | 34081 | 34094 | 2-10-2 | 783_1 | GCaaatattcacAA |
| 784 | aacacacattatca | 34537 | 34550 | 2-10-2 | 784_1 | AAcacacattatCA |
| 785 | taacacacattatc | 34538 | 34551 | 2-10-2 | 785_1 | TAacacacattaTC |
| 786 | ttaacacacattat | 34539 | 34552 | 2-10-2 | 786_1 | TTaacacacattAT |
| 787 | tttaacacacatta | 34540 | 34553 | 2-10-2 | 787_1 | TTtaacacacatTA |
| 788 | atttaacacacatt | 34541 | 34554 | 2-10-2 | 788_1 | ATttaacacacaTT |
| 789 | tatttaacacacat | 34542 | 34555 | 2-10-2 | 789_1 | TAtttaacacacAT |
| 790 | ctatttaacacaca | 34543 | 34556 | 2-10-2 | 790_1 | CTatttaacacaCA |
| 791 | actatttaacacac | 34544 | 34557 | 2-10-2 | 791_1 | ACtatttaacacAC |
| 792 | tactatttaacaca | 34545 | 34558 | 2-10-2 | 792_1 | TActatttaacaCA |
| 793 | ctactatttaacac | 34546 | 34559 | 2-10-2 | 793_1 | CTactatttaacAC |
| 794 | actactatttaaca | 34547 | 34560 | 2-10-2 | 794_1 | ACtactatttaaCA |
| 795 | aactactatttaac | 34548 | 34561 | 2-10-2 | 795_1 | AActactatttaAC |
| 796 | aaactactatttaa | 34549 | 34562 | 2-10-2 | 796_1 | AAactactatttAA |
| 797 | aaaactactattta | 34550 | 34563 | 2-10-2 | 797_1 | AAaactactattTA |
| 798 | gaaaactactattt | 34551 | 34564 | 2-10-2 | 798_1 | GAaaactactatTT |
| 799 | tgaaaactactatt | 34552 | 34565 | 2-10-2 | 799_1 | TGaaaactactaTT |
| 800 | aaataacctatcat | 35309 | 35322 | 2-10-2 | 800_1 | AAataacctatcAT |
| 801 | aaaataacctatca | 35310 | 35323 | 2-10-2 | 801_1 | AAaataacctatCA |
| 802 | caaaataacctatc | 35311 | 35324 | 2-10-2 | 802_1 | CAaaataacctaTC |
| 803 | acaaaataacctat | 35312 | 35325 | 2-10-2 | 803_1 | ACaaaataacctAT |
| 804 | cacaaaataaccta | 35313 | 35326 | 2-10-2 | 804_1 | CAcaaaataaccTA |
| 805 | tcacaaaataacct | 35314 | 35327 | 2-10-2 | 805_1 | TCacaaaataacCT |
| 806 | atcacaaaataacc | 35315 | 35328 | 2-10-2 | 806_1 | ATcacaaaataaCC |
| 807 | catcacaaaataac | 35316 | 35329 | 2-10-2 | 807_1 | CAtcacaaaataAC |
| 808 | tcatcacaaaataa | 35317 | 35330 | 2-10-2 | 808_1 | TCatcacaaaatAA |
| 809 | ttcatcacaaaata | 35318 | 35331 | 2-10-2 | 809_1 | TTcatcacaaaaTA |
| 810 | tttcatcacaaaat | 35319 | 35332 | 2-10-2 | 810_1 | TTtcatcacaaaAT |
| 811 | ttttcatcacaaaa | 35320 | 35333 | 2-10-2 | 811_1 | TTttcatcacaaAA |
| 812 | attttcatcacaaa | 35321 | 35334 | 2-10-2 | 812_1 | ATtttcatcacaAA |
| 813 | tattttcatcacaa | 35322 | 35335 | 2-10-2 | 813_1 | TAttttcatcacAA |
| 814 | gtattttcatcaca | 35323 | 35336 | 2-10-2 | 814_1 | GTattttcatcaCA |
| 815 | atttaaatttatca | 35354 | 35367 | 2-10-2 | 815_1 | ATttaaatttatCA |
| 816 | aatttaaatttatc | 35355 | 35368 | 2-10-2 | 816_1 | AAtttaaatttaTC |
| 817 | aaatttaaatttat | 35356 | 35369 | 2-10-2 | 817_1 | AAatttaaatttAT |
| 818 | aaaatttaaattta | 35357 | 35370 | 2-10-2 | 818_1 | AAaatttaaattTA |
| 819 | taaaatttaaattt | 35358 | 35371 | 2-10-2 | 819_1 | TAaaatttaaatTT |
| 820 | ataaaatttaaatt | 35359 | 35372 | 2-10-2 | 820_1 | ATaaaatttaaaTT |
| 821 | cataaaatttaaat | 35360 | 35373 | 2-10-2 | 821_1 | CAtaaaatttaaAT |
| 822 | acataaaatttaaa | 35361 | 35374 | 2-10-2 | 822_1 | ACataaaatttaAA |
| 823 | ctactaatattcat | 36332 | 36345 | 2-10-2 | 823_1 | CTactaatattcAT |
| 824 | cctactaatattca | 36333 | 36346 | 2-10-2 | 824_1 | CCtactaatattCA |
| 825 | acctactaatattc | 36334 | 36347 | 2-10-2 | 825_1 | ACctactaatatTC |
| 826 | cacctactaatatt | 36335 | 36348 | 2-10-2 | 826_1 | CAcctactaataTT |
| 827 | tcacctactaatat | 36336 | 36349 | 2-10-2 | 827_1 | TCacctactaatAT |
| 828 | ttcacctactaata | 36337 | 36350 | 2-10-2 | 828_1 | TTcacctactaaTA |
| 829 | tttcacctactaat | 36338 | 36351 | 2-10-2 | 829_1 | TTtcacctactaAT |
| 830 | ttttcacctactaa | 36339 | 36352 | 2-10-2 | 830_1 | TTttcacctactAA |
| 831 | tttttcacctacta | 36340 | 36353 | 2-10-2 | 831_1 | TTtttcacctacTA |
| 832 | atttttcacctact | 36341 | 36354 | 2-10-2 | 832_1 | ATttttcacctaCT |
| 833 | tatttttcacctac | 36342 | 36355 | 2-10-2 | 833_1 | TAtttttcacctAC |
| 834 | ttatttttcaccta | 36343 | 36356 | 2-10-2 | 834_1 | TTatttttcaccTA |
| 835 | tttatttttcacct | 36344 | 36357 | 2-10-2 | 835_1 | TTtatttttcacCT |
| 836 | ttctactactaatt | 36468 | 36481 | 2-10-2 | 836_1 | TTctactactaaTT |
| 837 | cttctactactaat | 36469 | 36482 | 2-10-2 | 837_1 | CTtctactactaAT |
| 838 | acttctactactaa | 36470 | 36483 | 2-10-2 | 838_1 | ACttctactactAA |
| 839 | aacttctactacta | 36471 | 36484 | 2-10-2 | 839_1 | AActtctactacTA |
| 840 | caacttctactact | 36472 | 36485 | 2-10-2 | 840_1 | CAacttctactaCT |
| 841 | tcaacttctactac | 36473 | 36486 | 2-10-2 | 841_1 | TCaacttctactAC |
| 842 | ctcaacttctacta | 36474 | 36487 | 2-10-2 | 842_1 | CTcaacttctacTA |
| 843 | tctcaacttctact | 36475 | 36488 | 2-10-2 | 843_1 | TCtcaacttctaCT |
| 844 | ctctcaacttctac | 36476 | 36489 | 2-10-2 | 844_1 | CTctcaacttctAC |
| 845 | tctctcaacttcta | 36477 | 36490 | 2-10-2 | 845_1 | TCtctcaacttcTA |
| 846 | ttctctcaacttct | 36478 | 36491 | 2-10-2 | 846_1 | TTctctcaacttCT |
| 847 | tttctctcaacttc | 36479 | 36492 | 2-10-2 | 847_1 | TTtctctcaactTC |
| 848 | ttttctctcaactt | 36480 | 36493 | 2-10-2 | 848_1 | TTttctctcaacTT |
| 849 | tttttctctcaact | 36481 | 36494 | 2-10-2 | 849_1 | TTtttctctcaaCT |
| 850 | ctttttctctcaac | 36482 | 36495 | 2-10-2 | 850_1 | CTttttctctcaAC |
| 851 | actttttctctcaa | 36483 | 36496 | 2-10-2 | 851_1 | ACtttttctctcAA |
| 852 | tactttttctctca | 36484 | 36497 | 2-10-2 | 852_1 | TActttttctctCA |
| 853 | ttactttttctctc | 36485 | 36498 | 2-10-2 | 853_1 | TTactttttctcTC |
| 854 | gttactttttctct | 36486 | 36499 | 2-10-2 | 854_1 | GTtactttttctCT |
| 855 | agttactttttctc | 36487 | 36500 | 2-10-2 | 855_1 | AGttactttttcTC |
| 856 | cattcccattaaca | 36788 | 36801 | 2-10-2 | 856_1 | CAttcccattaaCA |
| 857 | acattcccattaac | 36789 | 36802 | 2-10-2 | 857_1 | ACattcccattaAC |
| 858 | tacattcccattaa | 36790 | 36803 | 2-10-2 | 858_1 | TAcattcccattAA |
| 859 | ttacattcccatta | 36791 | 36804 | 2-10-2 | 859_1 | TTacattcccatTA |
| 860 | tttacattcccatt | 36792 | 36805 | 2-10-2 | 860_1 | TTtacattcccaTT |
| 861 | ttttacattcccat | 36793 | 36806 | 2-10-2 | 861_1 | TTttacattcccAT |
| 862 | cttttacattccca | 36794 | 36807 | 2-10-2 | 862_1 | CTtttacattccCA |
| 863 | acttttacattccc | 36795 | 36808 | 2-10-2 | 863_1 | ACttttacattcCC |
| 864 | cacttttacattcc | 36796 | 36809 | 2-10-2 | 864_1 | CActtttacattCC |
| 865 | acacttttacattc | 36797 | 36810 | 2-10-2 | 865_1 | ACacttttacatTC |
| 866 | tacacttttacatt | 36798 | 36811 | 2-10-2 | 866_1 | TAcacttttacaTT |
| 867 | gtacacttttacat | 36799 | 36812 | 2-10-2 | 867_1 | GTacacttttacAT |
| 868 | tgtacacttttaca | 36800 | 36813 | 2-10-2 | 868_1 | TGtacacttttaCA |
| 869 | tttatcaaaaaaat | 36834 | 36847 | 2-10-2 | 869_1 | TTtatcaaaaaaAT |
| 870 | atttatcaaaaaaa | 36835 | 36848 | 2-10-2 | 870_1 | ATttatcaaaaaAA |
| 871 | catttatcaaaaaa | 36836 | 36849 | 2-10-2 | 871_1 | CAtttatcaaaaAA |
| 872 | acatttatcaaaaa | 36837 | 36850 | 2-10-2 | 872_1 | ACatttatcaaaAA |
| 873 | tacatttatcaaaa | 36838 | 36851 | 2-10-2 | 873_1 | TAcatttatcaaAA |
| 874 | atacatttatcaaa | 36839 | 36852 | 2-10-2 | 874_1 | ATacatttatcaAA |
| 875 | tatacatttatcaa | 36840 | 36853 | 2-10-2 | 875_1 | TAtacatttatcAA |
| 876 | acatcttccaattt | 38848 | 38861 | 2-10-2 | 876_1 | ACatcttccaatTT |
| 877 | tacatcttccaatt | 38849 | 38862 | 2-10-2 | 877_1 | TAcatcttccaaTT |
| 878 | ttacatcttccaat | 38850 | 38863 | 2-10-2 | 878_1 | TTacatcttccaAT |
| 879 | tttacatcttccaa | 38851 | 38864 | 2-10-2 | 879_1 | TTtacatcttccAA |
| 880 | atttacatcttcca | 38852 | 38865 | 2-10-2 | 880_1 | ATttacatcttcCA |
| 881 | tatttacatcttcc | 38853 | 38866 | 2-10-2 | 881_1 | TAtttacatcttCC |
| 882 | ttatttacatcttc | 38854 | 38867 | 2-10-2 | 882_1 | TTatttacatctTC |
| 883 | cttatttacatctt | 38855 | 38868 | 2-10-2 | 883_1 | CTtatttacatcTT |
| 884 | tcttatttacatct | 38856 | 38869 | 2-10-2 | 884_1 | TCttatttacatCT |
| 885 | atcttatttacatc | 38857 | 38870 | 2-10-2 | 885_1 | ATcttatttacaTC |
| 886 | aatcttatttacat | 38858 | 38871 | 2-10-2 | 886_1 | AAtcttatttacAT |
| 887 | gaatcttatttaca | 38859 | 38872 | 2-10-2 | 887_1 | GAatcttatttaCA |
| 888 | tgaatcttatttac | 38860 | 38873 | 2-10-2 | 888_1 | TGaatcttatttAC |
| 889 | ttcccttcactcct | 40071 | 40084 | 2-10-2 | 889_1 | TTcccttcactcCT |
| 890 | tttcccttcactcc | 40072 | 40085 | 2-10-2 | 890_1 | TTtcccttcactCC |
| 891 | ttttcccttcactc | 40073 | 40086 | 2-10-2 | 891_1 | TTttcccttcacTC |
| 892 | attttcccttcact | 40074 | 40087 | 2-10-2 | 892_1 | ATtttcccttcaCT |
| 893 | aattttcccttcac | 40075 | 40088 | 2-10-2 | 893_1 | AAttttcccttcAC |
| 894 | taattttcccttca | 40076 | 40089 | 2-10-2 | 894_1 | TAattttcccttCA |
| 895 | ttaattttcccttc | 40077 | 40090 | 2-10-2 | 895_1 | TTaattttccctTC |
| 896 | gttaattttccctt | 40078 | 40091 | 2-10-2 | 896_1 | GTtaattttcccTT |
| 897 | tttatcatttcttt | 40150 | 40163 | 2-10-2 | 897_1 | TTtatcatttctTT |
| 898 | ttttatcatttctt | 40151 | 40164 | 2-10-2 | 898_1 | TTttatcatttcTT |
| 899 | cttttatcatttct | 40152 | 40165 | 2-10-2 | 899_1 | CTtttatcatttCT |
| 900 | tcttttatcatttc | 40153 | 40166 | 2-10-2 | 900_1 | TCttttatcattTC |
| 901 | ttcttttatcattt | 40154 | 40167 | 2-10-2 | 901_1 | TTcttttatcatTT |
| 902 | cttcttttatcatt | 40155 | 40168 | 2-10-2 | 902_1 | CTtcttttatcaTT |
| 903 | acttcttttatcat | 40156 | 40169 | 2-10-2 | 903_1 | ACttcttttatcAT |
| 904 | tacttcttttatca | 40157 | 40170 | 2-10-2 | 904_1 | TActtcttttatCA |
| 905 | ttacttcttttatc | 40158 | 40171 | 2-10-2 | 905_1 | TTacttcttttaTC |
| 906 | attacttcttttat | 40159 | 40172 | 2-10-2 | 906_1 | ATtacttcttttAT |
| 907 | aattacttctttta | 40160 | 40173 | 2-10-2 | 907_1 | AAttacttctttTA |
| 908 | aaattacttctttt | 40161 | 40174 | 2-10-2 | 908_1 | AAattacttcttTT |
| 909 | aaaattacttcttt | 40162 | 40175 | 2-10-2 | 909_1 | AAaattacttctTT |
| 910 | caaaattacttctt | 40163 | 40176 | 2-10-2 | 910_1 | CAaaattacttcTT |
| 911 | ccaaaattacttct | 40164 | 40177 | 2-10-2 | 911_1 | CCaaaattacttCT |
| 912 | tccaaaattacttc | 40165 | 40178 | 2-10-2 | 912_1 | TCcaaaattactTC |
| 913 | ttccaaaattactt | 40166 | 40179 | 2-10-2 | 913_1 | TTccaaaattacTT |
| 914 | gttccaaaattact | 40167 | 40180 | 2-10-2 | 914_1 | GTtccaaaattaCT |
| 915 | tgttccaaaattac | 40168 | 40181 | 2-10-2 | 915_1 | TGttccaaaattAC |
| 916 | atgttccaaaatta | 40169 | 40182 | 2-10-2 | 916_1 | ATgttccaaaatTA |
| 917 | ttactctttttatt | 40201 | 40214 | 2-10-2 | 917_1 | TTactctttttaTT |
| 918 | tttactctttttat | 40202 | 40215 | 2-10-2 | 918_1 | TTtactctttttAT |
| 919 | ttttactcttttta | 40203 | 40216 | 2-10-2 | 919_1 | TTttactcttttTA |
| 920 | attttactcttttt | 40204 | 40217 | 2-10-2 | 920_1 | ATtttactctttTT |
| 921 | tattttactctttt | 40205 | 40218 | 2-10-2 | 921_1 | TAttttactcttTT |
| 922 | atattttactcttt | 40206 | 40219 | 2-10-2 | 922_1 | ATattttactctTT |
| 923 | catattttactctt | 40207 | 40220 | 2-10-2 | 923_1 | CAtattttactcTT |
| 924 | ccatattttactct | 40208 | 40221 | 2-10-2 | 924_1 | CCatattttactCT |
| 925 | cccatattttactc | 40209 | 40222 | 2-10-2 | 925_1 | CCcatattttacTC |
| 926 | acccatattttact | 40210 | 40223 | 2-10-2 | 926_1 | ACccatattttaCT |
| 927 | tacccatattttac | 40211 | 40224 | 2-10-2 | 927_1 | TAcccatattttAC |
| 928 | ttacccatatttta | 40212 | 40225 | 2-10-2 | 928_1 | TTacccatatttTA |
| 929 | tttacccatatttt | 40213 | 40226 | 2-10-2 | 929_1 | TTtacccatattTT |
| 930 | gtttacccatattt | 40214 | 40227 | 2-10-2 | 930_1 | GTttacccatatTT |
| 931 | tgtttacccatatt | 40215 | 40228 | 2-10-2 | 931_1 | TGtttacccataTT |
| 932 | gttacctcccttta | 40368 | 40381 | 2-10-2 | 932_1 | GTtacctcccttTA |
| 933 | ggttacctcccttt | 40369 | 40382 | 2-10-2 | 933_1 | GGttacctccctTT |
| 934 | aggttacctccctt | 40370 | 40383 | 2-10-2 | 934_1 | AGgttacctcccTT |
| 935 | caaactaaaaccta | 41659 | 41672 | 2-10-2 | 935_1 | CAaactaaaaccTA |
| 936 | tcaaactaaaacct | 41660 | 41673 | 2-10-2 | 936_1 | TCaaactaaaacCT |
| 937 | atcaaactaaaacc | 41661 | 41674 | 2-10-2 | 937_1 | ATcaaactaaaaCC |
| 938 | gatcaaactaaaac | 41662 | 41675 | 2-10-2 | 938_1 | GAtcaaactaaaAC |
| 939 | agatcaaactaaaa | 41663 | 41676 | 2-10-2 | 939_1 | AGatcaaactaaAA |
| 940 | aagatcaaactaaa | 41664 | 41677 | 2-10-2 | 940_1 | AAgatcaaactaAA |
| 941 | ccaatttcacccaa | 41699 | 41712 | 2-10-2 | 941_1 | CCaatttcacccAA |
| 942 | cccaatttcaccca | 41700 | 41713 | 2-10-2 | 942_1 | CCcaatttcaccCA |
| 943 | gcccaatttcaccc | 41701 | 41714 | 2-10-2 | 943_1 | GCccaatttcacCC |
| 944 | tgcccaatttcacc | 41702 | 41715 | 2-10-2 | 944_1 | TGcccaatttcaCC |
| 945 | ttgcccaatttcac | 41703 | 41716 | 2-10-2 | 945_1 | TTgcccaatttcAC |
| 946 | caactttctatttt | 41777 | 41790 | 2-10-2 | 946_1 | CAactttctattTT |
| 947 | ccaactttctattt | 41778 | 41791 | 2-10-2 | 947_1 | CCaactttctatTT |
| 948 | cccaactttctatt | 41779 | 41792 | 2-10-2 | 948_1 | CCcaactttctaTT |
| 949 | acccaactttctat | 41780 | 41793 | 2-10-2 | 949_1 | ACccaactttctAT |
| 950 | aacccaactttcta | 41781 | 41794 | 2-10-2 | 950_1 | AAcccaactttcTA |
| 951 | aaacccaactttct | 41782 | 41795 | 2-10-2 | 951_1 | AAacccaactttCT |
| 952 | aaaacccaactttc | 41783 | 41796 | 2-10-2 | 952_1 | AAaacccaacttTC |
| 953 | aaaaacccaacttt | 41784 | 41797 | 2-10-2 | 953_1 | AAaaacccaactTT |
| 954 | caaaaacccaactt | 41785 | 41798 | 2-10-2 | 954_1 | CAaaaacccaacTT |
| 955 | acaaaaacccaact | 41786 | 41799 | 2-10-2 | 955_1 | ACaaaaacccaaCT |
| 956 | ctttaaaatttcca | 42170 | 42183 | 2-10-2 | 956_1 | CTttaaaatttcCA |
| 957 | tctttaaaatttcc | 42171 | 42184 | 2-10-2 | 957_1 | TCtttaaaatttCC |
| 958 | ttctttaaaatttc | 42172 | 42185 | 2-10-2 | 958_1 | TTctttaaaattTC |
| 959 | tttctttaaaattt | 42173 | 42186 | 2-10-2 | 959_1 | TTtctttaaaatTT |
| 960 | atttctttaaaatt | 42174 | 42187 | 2-10-2 | 960_1 | ATttctttaaaaTT |
| 961 | catttctttaaaat | 42175 | 42188 | 2-10-2 | 961_1 | CAtttctttaaaAT |
| 962 | acatttctttaaaa | 42176 | 42189 | 2-10-2 | 962_1 | ACatttctttaaAA |
| 963 | cacatttctttaaa | 42177 | 42190 | 2-10-2 | 963_1 | CAcatttctttaAA |
| 964 | ccacatttctttaa | 42178 | 42191 | 2-10-2 | 964_1 | CCacatttctttAA |
| 965 | accacatttcttta | 42179 | 42192 | 2-10-2 | 965_1 | ACcacatttcttTA |
| 966 | aaccacatttcttt | 42180 | 42193 | 2-10-2 | 966_1 | AAccacatttctTT |
| 967 | aaaccacatttctt | 42181 | 42194 | 2-10-2 | 967_1 | AAaccacatttcTT |
| 968 | aaaaccacatttct | 42182 | 42195 | 2-10-2 | 968_1 | AAaaccacatttCT |
| 969 | caaaaccacatttc | 42183 | 42196 | 2-10-2 | 969_1 | CAaaaccacattTC |
| 970 | ttcttctcttttca | 43831 | 43844 | 2-10-2 | 970_1 | TTcttctcttttCA |
| 971 | tttcttctcttttc | 43832 | 43845 | 2-10-2 | 971_1 | TTtcttctctttTC |
| 972 | ttttcttctctttt | 43833 | 43846 | 2-10-2 | 972_1 | TTttcttctcttTT |
| 973 | tttttcttctcttt | 43834 | 43847 | 2-10-2 | 973_1 | TTtttcttctctTT |
| 974 | ttttttcttctctt | 43835 | 43848 | 2-10-2 | 974_1 | TTttttcttctcTT |
| 975 | attttttcttctct | 43836 | 43849 | 2-10-2 | 975_1 | AT11111cttctCT |
| 976 | tattttttcttctc | 43837 | 43850 | 2-10-2 | 976_1 | TAIIIIIIcttcTC |
| 977 | aacttaatattaaa | 45488 | 45501 | 2-10-2 | 977_1 | AActtaatattaAA |
| 978 | caacttaatattaa | 45489 | 45502 | 2-10-2 | 978_1 | CAacttaatattAA |
| 979 | tcaacttaatatta | 45490 | 45503 | 2-10-2 | 979_1 | TCaacttaatatTA |
| 980 | ttcaacttaatatt | 45491 | 45504 | 2-10-2 | 980_1 | TTcaacttaataTT |
| 981 | attcaacttaatat | 45492 | 45505 | 2-10-2 | 981_1 | ATtcaacttaatAT |
| 982 | tattcaacttaata | 45493 | 45506 | 2-10-2 | 982_1 | TAttcaacttaaTA |
| 983 | ttattcaacttaat | 45494 | 45507 | 2-10-2 | 983_1 | TTattcaacttaAT |
| 984 | tttattcaacttaa | 45495 | 45508 | 2-10-2 | 984_1 | TTtattcaacttAA |
| 985 | caaattaaaaaaca | 47397 | 47410 | 2-10-2 | 985_1 | CAaattaaaaaaCA |
| 986 | tcaaattaaaaaac | 47398 | 47411 | 2-10-2 | 986_1 | TCaaattaaaaaAC |
| 987 | ttcaaattaaaaaa | 47399 | 47412 | 2-10-2 | 987_1 | TTcaaattaaaaAA |
| 988 | cttcaaattaaaaa | 47400 | 47413 | 2-10-2 | 988_1 | CTtcaaattaaaAA |
| 989 | tcttcaaattaaaa | 47401 | 47414 | 2-10-2 | 989_1 | TCttcaaattaaAA |
| 990 | ttcttcaaattaaa | 47402 | 47415 | 2-10-2 | 990_1 | TTcttcaaattaAA |
| 991 | tttcttcaaattaa | 47403 | 47416 | 2-10-2 | 991_1 | TTtcttcaaattAA |
| 992 | aacacaaattcaaa | 48077 | 48090 | 2-10-2 | 992_1 | AAcacaaattcaAA |
| 993 | aaacacaaattcaa | 48078 | 48091 | 2-10-2 | 993_1 | AAacacaaattcAA |
| 994 | taaacacaaattca | 48079 | 48092 | 2-10-2 | 994_1 | TAaacacaaattCA |
| 995 | ataaacacaaattc | 48080 | 48093 | 2-10-2 | 995_1 | ATaaacacaaatTC |
| 996 | aataaacacaaatt | 48081 | 48094 | 2-10-2 | 996_1 | AAtaaacacaaaTT |
| 997 | caataaacacaaat | 48082 | 48095 | 2-10-2 | 997_1 | CAataaacacaaAT |
| 998 | acaataaacacaaa | 48083 | 48096 | 2-10-2 | 998_1 | ACaataaacacaAA |
| 999 | aacaataaacacaa | 48084 | 48097 | 2-10-2 | 999_1 | AAcaataaacacAA |
| 1000 | taacaataaacaca | 48085 | 48098 | 2-10-2 | 1000_1 | TAacaataaacaCA |
| 1001 | ttaacaataaacac | 48086 | 48099 | 2-10-2 | 1001_1 | TTaacaataaacAC |
| 1002 | attaacaataaaca | 48087 | 48100 | 2-10-2 | 1002_1 | ATtaacaataaaCA |
| 1003 | aattaacaataaac | 48088 | 48101 | 2-10-2 | 1003_1 | AAttaacaataaAC |
| 1004 | gaattaacaataaa | 48089 | 48102 | 2-10-2 | 1004_1 | GAattaacaataAA |
| 1005 | tgaattaacaataa | 48090 | 48103 | 2-10-2 | 1005_1 | TGaattaacaatAA |
| 1006 | atattcctcaatca | 48905 | 48918 | 2-10-2 | 1006_1 | ATattcctcaatCA |
| 1007 | tatattcctcaatc | 48906 | 48919 | 2-10-2 | 1007_1 | TAtattcctcaaTC |
| 1008 | atatattcctcaat | 48907 | 48920 | 2-10-2 | 1008_1 | ATatattcctcaAT |
| 1009 | aatatattcctcaa | 48908 | 48921 | 2-10-2 | 1009_1 | AAtatattcctcAA |
| 1010 | caatatattcctca | 48909 | 48922 | 2-10-2 | 1010_1 | CAatatattcctCA |
| 1011 | acaatatattcctc | 48910 | 48923 | 2-10-2 | 1011_1 | ACaatatattccTC |
| 1012 | gacaatatattcct | 48911 | 48924 | 2-10-2 | 1012_1 | GAcaatatattcCT |
| 1013 | caatcctaattaaa | 48960 | 48973 | 2-10-2 | 1013_1 | CAatcctaattaAA |
| 1014 | ccaatcctaattaa | 48961 | 48974 | 2-10-2 | 1014_1 | CCaatcctaattAA |
| 1015 | cccaatcctaatta | 48962 | 48975 | 2-10-2 | 1015_1 | CCcaatcctaatTA |
| 1016 | gcccaatcctaatt | 48963 | 48976 | 2-10-2 | 1016_1 | GCccaatcctaaTT |
| 1017 | tgcccaatcctaat | 48964 | 48977 | 2-10-2 | 1017_1 | TGcccaatcctaAT |
| 1018 | accctacaaatact | 50093 | 50106 | 2-10-2 | 1018_1 | ACcctacaaataCT |
| 1019 | aaccctacaaatac | 50094 | 50107 | 2-10-2 | 1019_1 | AAccctacaaatAC |
| 1020 | aaaccctacaaata | 50095 | 50108 | 2-10-2 | 1020_1 | AAaccctacaaaTA |
| 1021 | aaaaccctacaaat | 50096 | 50109 | 2-10-2 | 1021_1 | AAaaccctacaaAT |
| 1022 | aaaaaccctacaaa | 50097 | 50110 | 2-10-2 | 1022_1 | AAaaaccctacaAA |
| 1023 | aaaaaaccctacaa | 50098 | 50111 | 2-10-2 | 1023_1 | AAaaaaccctacAA |
| 1024 | aaaaaaaccctaca | 50099 | 50112 | 2-10-2 | 1024_1 | AAaaaaaccctaCA |
| 1025 | tatacactattaat | 51008 | 51021 | 2-10-2 | 1025_1 | TAtacactattaAT |
| 1026 | ttatacactattaa | 51009 | 51022 | 2-10-2 | 1026_1 | TTatacactattAA |
| 1027 | attatacactatta | 51010 | 51023 | 2-10-2 | 1027_1 | ATtatacactatTA |
| 1028 | aattatacactatt | 51011 | 51024 | 2-10-2 | 1028_1 | AAttatacactaTT |
| 1029 | gaattatacactat | 51012 | 51025 | 2-10-2 | 1029_1 | GAattatacactAT |
| 1030 | gtaacaattataca | 51866 | 51879 | 2-10-2 | 1030_1 | GTaacaattataCA |
| 1031 | tgtaacaattatac | 51867 | 51880 | 2-10-2 | 1031_1 | TGtaacaattatAC |
| 1032 | ctgtaacaattata | 51868 | 51881 | 2-10-2 | 1032_1 | CTgtaacaattaTA |
| 1033 | cctgtaacaattat | 51869 | 51882 | 2-10-2 | 1033_1 | CCtgtaacaattAT |
| 1034 | tcctgtaacaatta | 51870 | 51883 | 2-10-2 | 1034_1 | TCctgtaacaatTA |
| 1035 | ataaaaaccacctt | 53263 | 53276 | 2-10-2 | 1035_1 | ATaaaaaccaccTT |
| 1036 | aataaaaaccacct | 53264 | 53277 | 2-10-2 | 1036_1 | AAtaaaaaccacCT |
| 1037 | gaataaaaaccacc | 53265 | 53278 | 2-10-2 | 1037_1 | GAataaaaaccaCC |
| 1038 | agaataaaaaccac | 53266 | 53279 | 2-10-2 | 1038_1 | AGaataaaaaccAC |
| 1039 | cagaataaaaacca | 53267 | 53280 | 2-10-2 | 1039_1 | CAgaataaaaacCA |
| 1040 | ccagaataaaaacc | 53268 | 53281 | 2-10-2 | 1040_1 | CCagaataaaaaCC |
| 1041 | cccagaataaaaac | 53269 | 53282 | 2-10-2 | 1041_1 | CCcagaataaaaAC |
| 1042 | acccagaataaaaa | 53270 | 53283 | 2-10-2 | 1042_1 | ACccagaataaaAA |
| 1043 | tttcttactcccct | 53699 | 53712 | 2-10-2 | 1043_1 | TTtcttactcccCT |
| 1044 | ctttcttactcccc | 53700 | 53713 | 2-10-2 | 1044_1 | CTttcttactccCC |
| 1045 | actttcttactccc | 53701 | 53714 | 2-10-2 | 1045_1 | ACtttcttactcCC |
| 1046 | cactttcttactcc | 53702 | 53715 | 2-10-2 | 1046_1 | CActttcttactCC |
| 1047 | ccactttcttactc | 53703 | 53716 | 2-10-2 | 1047_1 | CCactttcttacTC |
| 1048 | cctttaccactttt | 53948 | 53961 | 2-10-2 | 1048_1 | CCtttaccacttTT |
| 1049 | ccctttaccacttt | 53949 | 53962 | 2-10-2 | 1049_1 | CCctttaccactTT |
| 1050 | tccctttaccactt | 53950 | 53963 | 2-10-2 | 1050_1 | TCcctttaccacTT |
| 1051 | atccctttaccact | 53951 | 53964 | 2-10-2 | 1051_1 | ATccctttaccaCT |
| 1052 | catccctttaccac | 53952 | 53965 | 2-10-2 | 1052_1 | CAtccctttaccAC |
| 1053 | ctacatctaacccc | 54550 | 54563 | 2-10-2 | 1053_1 | CTacatcttaccCC |
| 1054 | tctacatctaaccc | 54551 | 54564 | 2-10-2 | 1054_1 | TCtacatctaacCC |
| 1055 | gtctacatctaacc | 54552 | 54565 | 2-10-2 | 1055_1 | GTctacatctaaCC |
| 1056 | agtctacatctaac | 54553 | 54566 | 2-10-2 | 1056_1 | AGtctacatctaAC |
| 1057 | cagtctacatctaa | 54554 | 54567 | 2-10-2 | 1057_1 | CAgtctacatctAA |
| 1058 | tcagtctacatcta | 54555 | 54568 | 2-10-2 | 1058_1 | TCagtctacatcTA |
| 1059 | ttcagtctacatct | 54556 | 54569 | 2-10-2 | 1059_1 | TTcagtctacatCT |
| 1060 | taaccacacctcct | 54573 | 54586 | 2-10-2 | 1060_1 | TAaccacacctcCT |
| 1061 | ttaaccacacctcc | 54574 | 54587 | 2-10-2 | 1061_1 | TTaaccacacctCC |
| 1062 | tttaaccacacctc | 54575 | 54588 | 2-10-2 | 1062_1 | TTtaaccacaccTC |
| 1063 | ttttaaccacacct | 54576 | 54589 | 2-10-2 | 1063_1 | TTttaaccacacCT |
| 1064 | gttttaaccacacc | 54577 | 54590 | 2-10-2 | 1064_1 | GTtttaaccacaCC |
| 1065 | agttttaaccacac | 54578 | 54591 | 2-10-2 | 1065_1 | AGttttaaccacAC |
| 1066 | caacaaaacatcaa | 55228 | 55241 | 2-10-2 | 1066_1 | CAacaaaacatcAA |
| 1067 | tcaacaaaacatca | 55229 | 55242 | 2-10-2 | 1067_1 | TCaacaaaacatCA |
| 1068 | ttcaacaaaacatc | 55230 | 55243 | 2-10-2 | 1068_1 | TTcaacaaaacaTC |
| 1069 | tttcaacaaaacat | 55231 | 55244 | 2-10-2 | 1069_1 | TTtcaacaaaacAT |
| 1070 | ttttcaacaaaaca | 55232 | 55245 | 2-10-2 | 1070_1 | TTttcaacaaaaCA |
| 1071 | gttttcaacaaaac | 55233 | 55246 | 2-10-2 | 1071_1 | GTtttcaacaaaAC |
| 1072 | tgttttcaacaaaa | 55234 | 55247 | 2-10-2 | 1072_1 | TGttttcaacaaAA |
| 1073 | ttctaaaacttacc | 55269 | 55282 | 2-10-2 | 1073_1 | TTctaaaacttaCC |
| 1074 | tttctaaaacttac | 55270 | 55283 | 2-10-2 | 1074_1 | TTtctaaaacttAC |
| 1075 | ctttctaaaactta | 55271 | 55284 | 2-10-2 | 1075_1 | CTttctaaaactTA |
| 1076 | tctttctaaaactt | 55272 | 55285 | 2-10-2 | 1076_1 | TCtttctaaaacTT |
| 1077 | atctttctaaaact | 55273 | 55286 | 2-10-2 | 1077_1 | ATctttctaaaaCT |
| 1078 | aatctttctaaaac | 55274 | 55287 | 2-10-2 | 1078_1 | AAtctttctaaaAC |
| 1079 | gaatctttctaaaa | 55275 | 55288 | 2-10-2 | 1079_1 | GAatctttctaaAA |
| 1080 | agaatctttctaaa | 55276 | 55289 | 2-10-2 | 1080_1 | AGaatctttctaAA |
| 1081 | cagaatctttctaa | 55277 | 55290 | 2-10-2 | 1081_1 | CAgaatctttctAA |
| 1082 | cctttatttccctt | 55494 | 55507 | 2-10-2 | 1082_1 | CCtttatttcccTT |
| 1083 | ccctttatttccct | 55495 | 55508 | 2-10-2 | 1083_1 | CCctttatttccCT |
| 1084 | tccctttatttccc | 55496 | 55509 | 2-10-2 | 1084_1 | TCcctttatttcCC |
| 1085 | ttccctttatttcc | 55497 | 55510 | 2-10-2 | 1085_1 | TTccctttatttCC |
| 1086 | tttccctttatttc | 55498 | 55511 | 2-10-2 | 1086_1 | TTtccctttattTC |
| 1087 | atttccctttattt | 55499 | 55512 | 2-10-2 | 1087_1 | ATttccctttatTT |
| 1088 | tatttccctttatt | 55500 | 55513 | 2-10-2 | 1088_1 | TAtttccctttaTT |
| 1089 | gtatttccctttat | 55501 | 55514 | 2-10-2 | 1089_1 | GTatttccctttAT |

### Example 2: In Vitro Reduction of ATXN3 in SK—N-AS Human Cell Line Using Further LNA Gapmer Oligonucleotides Targeting ATNX3

### Materials and Methods:

[0422] LNA modified oligonucleotides targeting human ATXN3 were tested for their ability to reduce ATXN3 mRNA expression in human SK—N-AS neuroblastoma cells acquired from ECACC Cat: 94092302. The cells were cultured according to the vendor guidelines in Dulbecco's Modified Eagle's Medium, supplemented with 0.1 mM Non-Essential Amino Acids (NEAA) and fetal bovine serum to a final concentration of 10%. Cells were cultured at 37° C., 5% CO₂ and 95% humidity in an active evaporation incubator (Thermo C10). Cells were seeded at a density of 9000 cells per well (96-well plate) in 190 ul of SK—N-AS cell culture medium. The cells were hereafter added 10 μl of oligo suspension or PBS (controls) to a final concentration of 5 μM from pre-made 96-well dilution plates. The cell culture plates were incubated for 72 hours in the incubator.

[0423] After incubation, cells were harvested by removal of media followed by cell lysis and RNA purification using QIAGEN RNeasy 96 Kit (cat 74181), following manufacturers protocol. RNA was diluted 2 fold in water prior to the one-step qPCR reaction. For one-step qPCR reaction qPCR-mix (qScript™ XLT One-Step RT-qPCR ToughMix® Low ROX from QuantaBio, cat. no 95134-500) and QPCR was run as duplex QPCR using assays from Integrated DNA technologies for ATXN3 (Hs.PT.58.39355049) and TBP (Hs.PT.58v.39858774)

Hs.PT.58.39355049-Primer Sequences
Probe:
(SEQ ID NO: 1130)
5′-/56-FAM/AAAGGCCAG/ZEN/CCACCAGTTCAGG/3IABkFQ/-3′
Primer 1:
(SEQ ID NO: 1129)
5′-CTATCAGGACAGAGTTCACATCC-3′
Primer 2:
(SEQ ID NO: 1128)
5′-GTTTCTAAAGACATGGTCACAGC-3′
Hs.PT.58v.39858774-Primer Sequences
Probe:
(SEQ ID NO: 1131)
5′-/5HEX/TGA TCT TTG/ZEN/CAG TGA CCC AGC ATC A/
3IABkFQ/-3′
Primer 1:
(SEQ ID NO: 1132)
5′-GCT GTT TAA CTT CGC TTC CG-3′
Primer 2:
(SEQ ID NO: 1133)
5′-CAG CAA CTT CCT CAA TTC CTT G-3′

[0424] The reactions were then mixed in a qPCR plate (MICROAMP® optical 384 well, 4309849). After sealing, the plate was given a quick spin, 1000 g for 1 minute at RT, and transferred to a Viia™ 7 system (Applied Biosystems, Thermo), and the following PCR conditions used: 50° C. for 15 minutes; 95° C. for 3 minutes; 40 cycles of: 95° C. for 5 sec followed by a temperature decrease of 1.6° C./sec followed by 60° C. for 45 sec. The data was analyzed using the QuantStudio™ Real_time PCR Software and quantity calculated by the delta delta Ct method (Quantity=2\hat{ }(−Ct)*1000000000). Quantity is normalized to the calculated quantity for the housekeeping gene assay (TBP) run in the same well. Relative Target Quantity=QUANTITY_target/QUANTITY_housekeeping (RNA knockdown) was calculated for each well by division with the mean of all PBS-treated wells on the same plate. Normalised Target Quantity=(Relative Target Quantity/[mean] Relative Target Quantity]_pbs_wells)*100.

[0425] Compounds targeting selected target sequence regions of SEQ ID NO:1 were evaluated in the above assay.

### Results:

[0426] The target knock-down data is presented in the following Compound and Data Table: In the Compound table, motif sequences represent the contiguous sequence of nucleobases present in the oligonucleotide.

[0427] Oligonucleotide compound represent specific designs of a motif sequence. Capital letters represent beta-D-oxy LNA nucleosides, lowercase letters represent DNA nucleosides, all LNA C are 5-methyl cytosine, all internucleoside linkages are phosphorothioate internucleoside linkages.

TABLE 4
Compound and Data Table

| | | | | % of |
|---|---|---|---|---|
| | | | | ATXN3 |
| SEQ | CMP | Oligonucleotide | Oligonucleotide | mRNA |
| ID | ID | Base Sequence | compound | remaining |
| 1099 | 1099_1 | CCAAAAGAAACCAAACCC | CCAAaagaaaccaaacCC | 90.6 |
| 1100 | 1100_1 | CCCCATTCAAATATTTATT | CCccattcaaatatttATT | 90.5 |
| 1101 | 1101_1 | AATCATTTACCCCCAAC | AAtcatttaccccCAAC | 92 |
| 1102 | 1102_1 | TATCTCAAACTATCCCCA | TAtctcaaactatcccCA | 93 |
| 1103 | 1103_1 | TCTATTCCTTAACCCAAC | TCTattccttaacccAAC | 76.6 |
| 1104 | 1104_1 | TCCCCTAAATAATTTAATCA | TCccctaaataatttaATCA | 79.3 |
| 1105 | 1105 1 | AAACCACTCCATTCCAA | AaaccactccattCCAA | 57.7 |
| 1106 | 1106_1 | TCTAAACCCCAAACTTTCA | TCtaaaccccaaactttCA | 74.3 |
| 1107 | 1107_1 | TTCTAAACCCCAAACTTTC | TTCtaaaccccaaacttTC | 61.8 |
| 1108 | 1108_1 | AGTTCTAAACCCCAAACT | AGttctaaaccccaaACT | 73.7 |
| 1109 | 1109_1 | TGAAACCATTACTACAACC | TGaaaccattactacAACC | 24.9 |
| 1110 | 1110_1 | ACATCATTTATCACTACCAC | ACAtcatttatcactaccAC | 71.9 |
| 1111 | 1111_1 | AACATTAAACCCTCCCA | AacattaaaccctcCCA | 80.2 |
| 1112 | 1112_1 | TCAGATCCTAAAATCACT | TCAgatcctaaaatcACT | 79.5 |
| 1113 | 1113_1 | CTATACCTAAAACAATCTA | CTAtacctaaaacaatCTA | 99.1 |
| 1114 | 1114_1 | TGATTCTTATACTTACTA | TGAttcttatacttaCTA | 72.1 |
| 1115 | 1115 1 | TAAAAATATAACTACTCCT | TAaaaatataactactCCTA | 93.7 |
| | | A | | |
| 1116 | 1116_1 | TCTTCATTATACCATCAAAT | TCTtcattataccatcaAAT | 51.5 |
| 1117 | 1117_1 | GTTTCATATTTTTAATCC | GTTtcatatttttaaTCC | 37.7 |
| 1118 | 1118_1 | TAATATCCTCATTACCCATT | TAatatcctcattacccaTT | 84 |
| 1119 | 1119_1 | CAAATATTCACAAATCCTA | CAaatattcacaaatCCTA | 73.3 |
| 1120 | 1120_1 | CATCACAAAATAACCTATC | CATcacaaaataacctaTC | 79.9 |
| | | A | A | |
| 1121 | 1121_1 | CTCTCAACTTCTACTACTAA | CTCtcaacttctactactAA | 59.6 |
| 1122 | 1122_1 | AATCTTATTTACATCTTCC | AATcttatttacatctTCC | 20.7 |
| 1123 | 1123_1 | CCAAAATTACTTCTTTTATC | CCAaaattacttcttttATC | 56.5 |
| 1124 | 1124_1 | AACCCAACTTTCTATTTT | AACCcaactttctattTT | 52.7 |
| 1125 | 1125_1 | ACAATATATTCCTCAATCA | ACAatatattcctcaaTCA | 86.8 |
| 1126 | 1126_1 | CCTGTAACAATTATACA | CCTgtaacaattatACA | 92.3 |
| 1127 | 1127_1 | CATCCCTTTACCACTTT | CAtccctttaccactTT | 94.5 |

[0428] In the oligonucleotide compound column, capital letters represent beta-D-oxy LNA nucleosides, LNA cytosines are 5-methyl cytosine, lower case letters are DNA nucleosides, and all internucleoside linkages are phosphorothioate.

[0429] As can be seen, most of the above compounds targeting the listed target sequence regions are capable of inhibiting the expression of the human ataxin 3 transcript and that compounds targeting the target sequence region complementary to SEQ ID NOS:1122 and 1109 are particularly effective in inhibiting the human ataxin 3 transcript. Other effective target sites for ATXN3 can be determined from the above table.

### Example 3

### Materials and Methods:

[0430] The screening assay described in Example 2 was performed using a series of further oligonucleotide targeting human ATXN3 pre-mRNA using the qpCR: (ATXN3_exon_8-9(1) PrimeTime® XL qPCR Assay (IDT).

qPCR probe and primers set 2:
Probe:
(SEQ ID NO: 1134)
5′-/56-FAM/CTCCGCAGG/ZEN/GCT ATTCAGCT AAGT/
3IABkFQ/-3′
Primer 1:
(SEQ ID NO: 1135)
5′-AGT AAGATTTGT ACCTGATGTCTGT-3′
Primer 2:
(SEQ ID NO: 1136)
5′-CATGGAAGATGAGGAAGCAGAT-3′

### Results:

[0431] The results are shown in the following table:

TABLE 5

| | | | | % of |
|---|---|---|---|---|
| | | | | ATXN3 |
| SEQ | CMP | Oligonucleotide | Oligonucleotide | mRNA |
| ID | ID | Base Sequence | compound | remaining |
| 1137 | 1137_1 | CCTACTTCACTTCCTAA | CctacttcacttcCTAA | 68.9 |
| 1138 | 1138_1 | TTTCCTACTTCACTTCCTA | TttcctacttcacttccTA | 95.1 |
| 1139 | 1139_1 | TTCCTACTTCACTTCCTA | TtcctacttcacttcCTA | 85 |
| 1140 | 1140_1 | TTTCCTACTTCACTTCCT | TTtcctacttcacttcCT | 88.1 |
| 1141 | 1141_1 | TTTCCTACTTCACTTCC | TttcctacttcactTCC | 83.1 |
| 1142 | 1142_1 | GTTTCCTACTTCACTTC | GTTtcctacttcactTC | 60.2 |
| 1143 | 1143_1 | ACCAAACCCAAACATCCC | AccaaacccaaacatcCC | 88 |
| 1144 | 1144_1 | AGAAACCAAACCCAAACATC | AgaaaccaaacccaaaCATC | 91.3 |
| 1145 | 1145_1 | AGAAACCAAACCCAAACAT | AGaaaccaaacccaaACAT | 93.5 |
| 1146 | 1146_1 | CTCCTAATACCTAAAAACAA | CTCCtaatacctaaaaacaAA | 100 |
| | | A | | |
| 1147 | 1147_1 | CTCCTAATACCTAAAAACA | CTCCtaatacctaaaaaCA | 94.2 |
| 1148 | 1148_1 | ACTCCTAATACCTAAAAACA | ACTCctaatacctaaaaaCA | 81 |
| 1149 | 1149_1 | CACTCCTAATACCTAAAAAC | CACtcctaatacctaaaaACA | 90.4 |
| | | A | | |
| 1150 | 1150_1 | CCACTCCTAATACCTAAAAA | CCACtcctaatacctaaaAA | 63 |
| 1151 | 1151_1 | TCCACTCCTAATACCTAAAAA | TCCactcctaatacctaaaAA | 54 |
| 1152 | 1152_1 | CCACTCCTAATACCTAAAA | CCACtcctaatacctaaAA | 73.7 |
| 1153 | 1153_1 | TCCACTCCTAATACCTAAAA | TCCactcctaatacctaAAA | 59 |
| 1154 | 1154_1 | CCACTCCTAATACCTAAA | CCACtcctaatacctaAA | 65.2 |
| 1155 | 1155_1 | GTCCACTCCTAATACCTAAA | GtccactcctaataccTAAA | 86.8 |
| 1156 | 1156_1 | CCACTCCTAATACCTAA | CCactcctaatacCTAA | 52.3 |
| 1157 | 1157_1 | TCCACTCCTAATACCTAA | TCcactcctaatacCTAA | 64.3 |
| 1157 | 1157_2 | TCCACTCCTAATACCTAA | TCCActcctaatacctAA | 66 |
| 1158 | 1158_1 | GTCCACTCCTAATACCTAA | GtccactcctaataccTAA | 85.5 |
| 1159 | 1159_1 | AGTCCACTCCTAATACCTA | AgtccactcctaataccTA | 87.4 |
| 1160 | 1160_1 | TCCACTCCTAATACCTA | TCcactcctaatacCTA | 70.1 |
| 1161 | 1161_1 | AGTCCACTCCTAATACCT | AgtccactcctaatacCT | 84.2 |
| 1162 | 1162_1 | GTCCACTCCTAATACC | GTCcactcctaataCC | 57.8 |
| 1163 | 1163_1 | AGTCCACTCCTAATACC | AGtccactcctaataCC | 77.1 |
| 1164 | 1164_1 | CAGTCCACTCCTAATACC | CagtccactcctaatACC | 86.7 |
| 1162 | 1162_2 | GTCCACTCCTAATACC | GTCcactcctaatACC | 67.8 |
| 1165 | 1165_1 | CCAGTCCACTCCTAATAC | CcagtccactcctaaTAC | 85.4 |
| 1166 | 1166_1 | CAGTCCACTCCTAATAC | CAgtccactcctaaTAC | 60.7 |
| 1167 | 1167_1 | AGTCCACTCCTAATAC | AGTCcactcctaatAC | 78.9 |
| 1168 | 1168_1 | CAGTCCACTCCTAATA | CAGtccactcctaaTA | 44.5 |
| 1169 | 1169_1 | CCAGTCCACTCCTAATA | CCagtccactcctaaTA | 33.8 |
| 1170 | 1170_1 | GCAACTCTTTCCAAACA | GCAActctttccaaaCA | 36 |
| 1171 | 1171_1 | AGCAACTCTTTCCAAACA | AGCaactctttccaaaCA | 35.3 |
| 1172 | 1172_1 | CAGCAACTCTTTCCAAACA | CAgcaactctttccaaACA | 58.3 |
| 1173 | 1173_1 | CCAGCAACTCTTTCCAAA | CcagcaactctttcCAAA | 69.7 |
| 1174 | 1174_1 | CCAGCAACTCTTTCCAA | CCagcaactctttcCAA | 42.1 |
| 1175 | 1175_1 | ACCAGCAACTCTTTCCAA | ACcagcaactctttcCAA | 65 |
| 1176 | 1176_1 | TTACCAGCAACTCTTTC | TTACcagcaactcttTC | 53 |
| 1177 | 1177_1 | TGCTCCTCCTATTAAATAA | TGCtcctcctattaaatAA | 76.3 |
| 1178 | 1178_1 | GCTCCTCCTATTAAATAA | GCtcctcctattaaATAA | 61.8 |
| 1179 | 1179_1 | GCTCCTCCTATTAAATA | GCtcctcctattaaATA | 60.2 |
| 1180 | 1180_1 | TGCTCCTCCTATTAAATA | TGctcctcctattaaATA | 70.2 |
| 1181 | 1181_1 | TGCTCCTCCTATTAAAT | TGCtcctcctattaaAT | 80.2 |
| 1182 | 1182_1 | TTGCTCCTCCTATTAAAT | TTGCtcctcctattaaAT | 79 |
| 1183 | 1183_1 | ATTTAATAAAACAAAAACCC | ATttaataaaacaaaaaCCCT | 97.2 |
| | | T | | |
| 1184 | 1184_1 | GCCCAAAAAACTAAATT | GCCCaaaaaactaaaTT | 95.5 |
| 1185 | 1185_1 | GTTTTTACATTCTAACTT | GTTtttacattctaaCTT | 54.1 |
| 1186 | 1186_1 | TGTTTTTACATTCTAACT | TGTTtttacattctaaCT | 63.8 |
| 1187 | 1187_1 | CTGTTTTTACATTCTAAC | CTGTttttacattctaAC | 62.5 |
| 1188 | 1188_1 | CCCCATTCAAATATTTAT | CCCcattcaaatattTAT | 64.9 |
| 1189 | 1189_1 | GCCCCATTCAAATATTTAT | GCcccattcaaatattTAT | 86.2 |
| 1188 | 1188_2 | CCCCATTCAAATATTTAT | CCCCattcaaatatttAT | 96.2 |
| 1190 | 1190_1 | GCCCCATTCAAATATTTA | GCcccattcaaatatTTA | 82.2 |
| 1191 | 1191_1 | CCATTCAAATATATACATTTT | CCATtcaaatatatacattTT | 72 |
| 1191 | 1191_2 | CCATTCAAATATATACATTTT | CCATtcaaataTatacattTT | 37.7 |
| 1192 | 1192_1 | TCCATTCAAATATATACATTT | TCCAttcaaatatatacatTT | 56.8 |
| 1193 | 1193_1 | ATCCATTCAAATATATACATT | ATCCattcaaaTatatacaTT | 48 |
| 1194 | 1194_1 | TCCATTCAAATATATACATT | TCCAttcaaatatatacaTT | 53.7 |
| 1193 | 1193_2 | ATCCATTCAAATATATACATT | ATCCattcaaatatatacaTT | 54.7 |
| 1195 | 1195_1 | TATCCATTCAAATATATACAT | TATccattcaaatatataCAT | 80.1 |
| 1196 | 1196_1 | TCCATTCAAATATATACAT | TCCattcaaatatataCAT | 43.1 |
| 1197 | 1197_1 | ATCCATTCAAATATATACA | ATCCattcaaatatataCA | 53.9 |
| 1198 | 1198_1 | TTATCCATTCAAATATATACA | TTatccattcaaatataTACA | 69.4 |
| 1199 | 1199_1 | TCCATTCAAATATATACA | TCCAttcaaatatataCA | 54.7 |
| 1200 | 1200_1 | TATCCATTCAAATATATACA | TATCcattcaaatatataCA | 53.3 |
| 1201 | 1201_1 | CTTTATCCATTCAAATATATA | CTttatccattcaaataTATA | 85.5 |
| 1202 | 1202_1 | TCTTTATCCATTCAAATATAT | TCTttatccattcaaataTAT | 62.6 |
| 1203 | 1203_1 | CTCTTTATCCATTCAAATATA | CTCtttatccattcaaatATA | 38.4 |
| 1204 | 1204_1 | TCTTTATCCATTCAAATATA | TCtttatccattcaaaTATA | 70.9 |
| 1203 | 1203_2 | CTCTTTATCCATTCAAATATA | CTCTttatccattcaaataTA | 33.6 |
| 1205 | 1205_1 | CTTTATCCATTCAAATATA | CTttatccattcaaaTATA | 78.4 |
| 1206 | 1206_1 | TCTCTTTATCCATTCAAATAT | TCtctttatccattcaaaTAT | 82 |
| 1207 | 1207_1 | CTCTTTATCCATTCAAATAT | CTCtttatccattcaaaTAT | 39.8 |
| 1208 | 1208_1 | TCTTTATCCATTCAAATAT | TCTttatccattcaaaTAT | 63.1 |
| 1209 | 1209_1 | TCTCTTTATCCATTCAAATA | TCtctttatccattcaAATA | 65.2 |
| 1210 | 1210_1 | CTCTTTATCCATTCAAATA | CTCTttatccattcaaaTA | 32.2 |
| 1211 | 1211_1 | TCTCTTTATCCATTCAAAT | TCTCtttatccattcaaAT | 42 |
| 1212 | 1212_1 | TCTCTTTATCCATTCAAA | TCTCtttatccattcaAA | 42.5 |
| 1213 | 1213_1 | AGCACCATATATATCTCA | AgcaccatatatatCTCA | 16 |
| 1214 | 1214_1 | GCACCATATATATCTCA | GCaccatatatatcTCA | 16 |
| 1215 | 1215_1 | CAGCACCATATATATCTCA | CagcaccatatatatCTCA | 19.2 |
| 1215 | 1215_2 | CAGCACCATATATATCTCA | CAgcaccatatatatcTCA | 24.1 |
| 1216 | 1216_1 | AGCACCATATATATCTC | AGCaccatatatatcTC | 19.9 |
| 1217 | 1217_1 | GCACCATATATATCTC | GCACcatatatatcTC | 82.7 |
| 1218 | 1218_1 | CAGCACCATATATATCTC | CAgcaccatatatatCTC | 21.1 |
| 1219 | 1219_1 | CAGCACCATATATATCT | CAGcaccatatataTCT | 28.9 |
| 1220 | 1220_1 | ACAGCACCATATATATCT | ACAGcaccatatatatCT | 21.9 |
| 1221 | 1221_1 | ACAGCACCATATATATC | ACAGcaccatatataTC | 25.4 |
| 1222 | 1222_1 | CTATGTTATTATCCCCA | CTAtgttattatcccCA | 56.1 |
| 1223 | 1223_1 | TCTATGTTATTATCCCC | TctatgttattatcCCC | 47.7 |
| 1224 | 1224_1 | CTCTACACTCTAACTCT | CtctacactctaaCTCT | 79.3 |
| 1225 | 1225_1 | TCTCTACACTCTAACTCT | TctctacactctaaCTCT | 79.6 |
| 1226 | 1226_1 | TTCTCTACACTCTAACTCT | TTCtctacactctaactCT | 86.9 |
| 1227 | 1227_1 | CTTCTCTACACTCTAACTCT | CTtctctacactctaactCT | 97 |
| 1227 | 1227_2 | CTTCTCTACACTCTAACTCT | CttctctacactctaacTCT | 84.5 |
| 1228 | 1228_1 | TTCTCTACACTCTAACTC | TTCtctacactctaacTC | 81.4 |
| 1229 | 1229_1 | CTTCTCTACACTCTAACTC | CttctctacactctaaCTC | 89.1 |
| 1230 | 1230_1 | TCTCTACACTCTAACTC | TCtctacactctaaCTC | 87.3 |
| 1231 | 1231_1 | CCTTCTCTACACTCTAACTC | CcttctctacactctaacTC | 98.3 |
| 1232 | 1232_1 | TTCTCTACACTCTAACT | TTCTctacactctaaCT | 80.1 |
| 1233 | 1233_1 | CTTCTCTACACTCTAACT | CTTctctacactctaaCT | 73.6 |
| 1234 | 1234_1 | CCTTCTCTACACTCTAACT | CcttctctacactctAACT | 77.7 |
| 1235 | 1235_1 | CCTTCTCTACACTCTAAC | CCTtctctacactctaAC | 82.4 |
| 1236 | 1236_1 | CTTCTCTACACTCTAAC | CTtctctacactcTAAC | 90.6 |
| 1237 | 1237_1 | AGCCTTCTCTACACTCTAA | AgccttctctacactcTAA | 80 |
| 1238 | 1238_1 | CCTTCTCTACACTCTAA | CCttctctacactcTAA | 72.2 |
| 1239 | 1239_1 | GCCTTCTCTACACTCTAA | GCcttctctacactctAA | 62.9 |
| 1240 | 1240_1 | AGCCTTCTCTACACTCTA | AgccttctctacactcTA | 85.2 |
| 1241 | 1241_1 | TACTAACTACAACACAAATC | TACtaactacaacacaaaTCA | 91.3 |
| | | A | | |
| 1241 | 1241_2 | TACTAACTACAACACAAATC | TACtaactacAacacaaaTC | 81.1 |
| | | A | A | |
| 1242 | 1242_1 | CTACTAACTACAACACAAAT | CTACtaactacaacacaaaTC | 108 |
| | | C | | |
| 1243 | 1243_1 | CACTACTAACTACAACACAA | CACTactaactacaacacaA | 74 |
| | | A | A | |
| 1244 | 1244_1 | CACTACTAACTACAACACAA | CACtactaactacaacaCAA | 87.4 |
| 1245 | 1245_1 | ACACTACTAACTACAACACA | ACActactaactacaacaCA | 84.1 |
| | | A | A | |
| 1246 | 1246_1 | CACTACTAACTACAACACA | CACTactaactacaacaCA | 83.5 |
| 1247 | 1247_1 | ACACTACTAACTACAACACA | ACACtactaactacaacaCA | 81.3 |
| 1248 | 1248_1 | GACACTACTAACTACAACAC | GACactactaactacaaCAC | 51.6 |
| 1249 | 1249_1 | GACACTACTAACTACAACA | GACActactaactacaaCA | 51 |
| 1250 | 1250_1 | AGACACTACTAACTACAA | AGAcactactaactaCAA | 57.2 |
| 1251 | 1251_1 | AGACACTACTAACTACA | AGACactactaactaCA | 34.7 |
| 1252 | 1252_1 | ATCATTTACCCCCAACCT | AtcatttacccccaacCT | 96 |
| 1253 | 1253_1 | ATCATTTACCCCCAACC | AtcatttacccccAACC | 89.1 |
| 1254 | 1254_1 | CAAATCATTTACCCCCAA | CaaatcatttacccCCAA | 92 |
| 1255 | 1255_1 | CCAAATCATTTACCCCCAA | CcaaatcatttaccccCAA | 91 |
| 1256 | 1256_1 | ACCAAATCATTTACCCCCA | AccaaatcatttaccccCA | 89.9 |
| 1257 | 1257_1 | TACCAAATCATTTACCCCC | TaccaaatcatttacccCC | 84 |
| 1258 | 1258_1 | ACCAAATCATTTACCCC | ACcaaatcatttacCCC | 69.9 |
| 1259 | 1259_1 | TACCAAATCATTTACCCC | TACcaaatcatttaccCC | 56.3 |
| 1260 | 1260_1 | CTACCAAATCATTTACCCC | CtaccaaatcatttaccCC | 94 |
| 1261 | 1261_1 | TACCAAATCATTTACCC | TAccaaatcatttACCC | 68.9 |
| 1262 | 1262_1 | CTACCAAATCATTTACC | CTACcaaatcatttaCC | 70.3 |
| 1263 | 1263_1 | TGCTACCAAATCATTTACC | TgctaccaaatcattTACC | 79 |
| 1264 | 1264_1 | GCTACCAAATCATTTACC | GCtaccaaatcatttACC | 83.6 |
| 1265 | 1265_1 | TGCTACCAAATCATTTAC | TGCTaccaaatcatttAC | 88.3 |
| 1266 | 1266_1 | GCTACCAAATCATTTAC | GCTaccaaatcattTAC | 71.4 |
| 1267 | 1267_1 | TGCTACCAAATCATTTA | TGCtaccaaatcatTTA | 79.8 |
| 1268 | 1268_1 | CTGCTACCAAATCATTTA | CTGctaccaaatcatTTA | 75.3 |
| 1269 | 1269_1 | ACTGCTACCAAATCATTT | ACTGctaccaaatcatTT | 83.4 |
| 1270 | 1270_1 | CTGCTACCAAATCATTT | CTGCtaccaaatcatTT | 83 |
| 1271 | 1271_1 | ACTGCTACCAAATCATT | ACTGctaccaaatcaTT | 71.1 |
| 1272 | 1272_1 | CACTTTGCCATAATCAA | CActttgccataaTCAA | 26 |
| 1273 | 1273_1 | TTATCTCAAACTATCCCCA | TTAtctcaaactatcccCA | 92.9 |
| 1274 | 1274_1 | ATCTCAAACTATCCCCA | ATctcaaactatccCCA | 72.3 |
| 1275 | 1275_1 | CTTATCTCAAACTATCCCCA | CttatctcaaactatcccCA | 85.5 |
| 1276 | 1276_1 | TATCTCAAACTATCCCC | TatctcaaactatcCCC | 79.8 |
| 1277 | 1277_1 | CTTATCTCAAACTATCCCC | CTtatctcaaactatccCC | 84 |
| 1278 | 1278_1 | TTATCTCAAACTATCCCC | TTAtctcaaactatccCC | 89.7 |
| 1279 | 1279_1 | CTTATCTCAAACTATCCC | CttatctcaaactaTCCC | 83.5 |
| 1280 | 1280_1 | CCTTATCTCAAACTATCCC | CcttatctcaaactatcCC | 87.6 |
| 1279 | 1279_2 | CTTATCTCAAACTATCCC | CTtatctcaaactatCCC | 76.9 |
| 1281 | 1281_1 | TTATCTCAAACTATCCC | TtatctcaaactaTCCC | 84.7 |
| 1282 | 1282_1 | CTTATCTCAAACTATCC | CTTatctcaaactaTCC | 78.3 |
| 1283 | 1283_1 | CCCTTATCTCAAACTATCC | CccttatctcaaactaTCC | 76.4 |
| 1284 | 1284_1 | CCTTATCTCAAACTATCC | CCTtatctcaaactatCC | 69.3 |
| 1285 | 1285_1 | CCTTATCTCAAACTATC | CCttatctcaaacTATC | 75.9 |
| 1286 | 1286_1 | GCCCTTATCTCAAACTATC | GCccttatctcaaactaTC | 76.6 |
| 1287 | 1287_1 | CCCTTATCTCAAACTATC | CCcttatctcaaacTATC | 67.2 |
| 1288 | 1288_1 | TGCCCTTATCTCAAACTAT | TgcccttatctcaaacTAT | 90.5 |
| 1289 | 1289_1 | GCCCTTATCTCAAACTAT | GCccttatctcaaacTAT | 71.9 |
| 1290 | 1290_1 | CCCTTATCTCAAACTAT | CCCTtatctcaaactAT | 77.7 |
| 1291 | 1291_1 | GCCCTTATCTCAAACTA | GCccttatctcaaacTA | 68.4 |
| 1292 | 1292_1 | TGCCCTTATCTCAAACTA | TgcccttatctcaaaCTA | 81.5 |
| 1293 | 1293_1 | TGCCCTTATCTCAAACT | TGcccttatctcaaaCT | 75.7 |
| 1294 | 1294_1 | TTGCCCTTATCTCAAAC | TTGCccttatctcaaAC | 89 |
| 1295 | 1295_1 | CTTGCCCTTATCTCAA | CTtgcccttatcTCAA | 48.2 |
| 1296 | 1296_1 | TGAAATCAAACTTCATCA | TGAaatcaaacttcaTCA | 66.5 |
| 1297 | 1297_1 | GGTCACCATACTTAAT | GGTCaccatacttaAT | 89.7 |
| 1298 | 1298_1 | TGCTAACACAAATTTCCT | TGctaacacaaattTCCT | 47.3 |
| 1299 | 1299_1 | GCTAACACAAATTTCCT | GCTaacacaaatttCCT | 48.9 |
| 1299 | 1299_2 | GCTAACACAAATTTCCT | GCtaacacaaattTCCT | 45.7 |
| 1300 | 1300_1 | TTGCTAACACAAATTTCC | TTGCtaacacaaatttCC | 60.7 |
| 1301 | 1301_1 | TGCTAACACAAATTTCC | TGCTaacacaaatttCC | 62.6 |
| 1302 | 1302_1 | TTGCTAACACAAATTTC | TTGCtaacacaaattTC | 72.4 |
| 1303 | 1303_1 | CCTTTGCTAACACAAAT | CCTTtgctaacacaaAT | 48.1 |
| 1304 | 1304_1 | GTATAACCAATAATAACTA | GTAtaaccaataataaCTA | 86.1 |
| 1305 | 1305_1 | TCTGACATCACACAATTT | TCTGacatcacacaatTT | 67.8 |
| 1306 | 1306_1 | TCTGACATCACACAATT | TCTGacatcacacaaTT | 70.2 |
| 1307 | 1307_1 | TATCTGACATCACACAA | TATctgacatcacaCAA | 69.8 |
| 1308 | 1308_1 | CTATTCCTTAACCCAAC | CTattccttaaccCAAC | 77.7 |
| 1309 | 1309_1 | GTCTATTCCTTAACCCAAC | GtctattccttaaccCAAC | 86.2 |
| 1310 | 1310_1 | GTCTATTCCTTAACCCAA | GtctattccttaacCCAA | 60.4 |
| 1311 | 1311_1 | TCTATTCCTTAACCCAA | TCTattccttaaccCAA | 51 |
| 1312 | 1312_1 | GTCTATTCCTTAACCCA | GtctattccttaacCCA | 67.3 |
| 1313 | 1313_1 | GTCTATTCCTTAACCC | GtctattccttaaCCC | 77.4 |
| 1314 | 1314_1 | GGTCTATTCCTTAACC | GGtctattccttaaCC | 83.2 |
| 1315 | 1315_1 | AGAACATTTCCTTCTCCT | AgaacatttccttctcCT | 84.2 |
| 1316 | 1316_1 | AACTGTCCCAAACAACC | AACtgtcccaaacaaCC | 75 |
| 1317 | 1317_1 | TTAGTCTCCCTCATTTTC | TtagtctccctcattTTC | 72.4 |
| 1318 | 1318_1 | ATTTAGTCTCCCTCATT | ATttagtctccctCATT | 48 |
| 1319 | 1319_1 | ATGCATCAAATCTCATA | ATGCatcaaatctcaTA | 83.7 |
| 1320 | 1320_1 | CCTAAATAATTTAATCATTAA | CCTaaataatttaatcatTAA | 94 |
| 1321 | 1321_1 | CCCTAAATAATTTAATCATTA | CCCTaaataatttaatcatTA | 88.8 |
| 1322 | 1322_1 | CCCCTAAATAATTTAATCATT | CCCctaaataatttaatcATT | 80.7 |
| 1323 | 1323_1 | CCCTAAATAATTTAATCATT | CCCTaaataatttaatcaTT | 82.2 |
| 1324 | 1324_1 | CCCTAAATAATTTAATCAT | CCCtaaataatttaatCAT | 87.1 |
| 1325 | 1325_1 | CCCCTAAATAATTTAATCA | CCCctaaataatttaaTCA | 79.9 |
| 1326 | 1326_1 | CCCTAAATAATTTAATCA | CCCtaaataatttaaTCA | 82.5 |
| 1327 | 1327_1 | CCCCTAAATAATTTAATC | CCCCtaaataatttaaTC | 116 |
| 1328 | 1328_1 | TCCCCTAAATAATTTAATC | TCCCctaaataatttaaTC | 109 |
| 1329 | 1329_1 | TTGCTAATATTTCCAAAA | TTGCtaatatttccaaAA | 84.2 |
| 1330 | 1330_1 | CTTGCTAATATTTCCAA | CTtgctaatatttCCAA | 66.1 |
| 1331 | 1331_1 | ACTGTCATCCATATTTCC | ActgtcatccatattTCC | 66.2 |
| 1332 | 1332_1 | ACTGTCATCCATATTTC | ACTgtcatccatatTTC | 48.1 |
| 1333 | 1333_1 | AATGCCCCACTCTAATAT | AATGccccactctaatAT | 36.9 |
| 1334 | 1334_1 | TGCCCCACTCTAATAT | TGCcccactctaatAT | 52.8 |
| 1335 | 1335_1 | ATGCCCCACTCTAATAT | ATgccccactctaaTAT | 43.7 |
| 1336 | 1336_1 | AAATGCCCCACTCTAATA | AAATgccccactctaaTA | 25.7 |
| 1337 | 1337_1 | ATGCCCCACTCTAATA | ATGccccactctaaTA | 28.6 |
| 1338 | 1338_1 | AATGCCCCACTCTAATA | AATGccccactctaaTA | 29.9 |
| 1339 | 1339_1 | TTAAATGCCCCACTCTA | TtaaatgccccactCTA | 51.3 |
| 1340 | 1340_1 | TCTGAAAATTCACTATCT | TCTGaaaattcactatCT | 35.7 |
| 1341 | 1341_1 | GTCTACTATATACATCT | GTCtactatatacaTCT | 30.6 |
| 1342 | 1342_1 | AGTCTACTATATACATCT | AGTCtactatatacatCT | 45.3 |
| 1343 | 1343_1 | AGTCTACTATATACATC | AGTCtactatatacaTC | 57 |
| 1344 | 1344_1 | GTCTACTATATACATC | GTCTactatatacaTC | 46.5 |
| 1345 | 1345_1 | TAGTCTACTATATACATC | TAgtctactatataCATC | 68.3 |
| 1346 | 1346_1 | TAGTCTACTATATACAT | TAGtctactatataCAT | 89 |
| 1347 | 1347_1 | CTAGTCTACTATATACAT | CTAgtctactatataCAT | 86.6 |
| 1348 | 1348_1 | CTAGTCTACTATATACA | CTAGtctactatataCA | 88.5 |
| 1349 | 1349_1 | ACTAGTCTACTATATAC | ACTagtctactataTAC | 85.1 |
| 1350 | 1350_1 | CTAGTCTACTATATAC | CTAgtctactataTAC | 85.3 |
| 1351 | 1351_1 | GTATATTCTACCCATAA | GTAtattctacccaTAA | 51.3 |
| 1352 | 1352_1 | TGTATATTCTACCCATAA | TGTatattctacccaTAA | 48.4 |
| 1353 | 1353_1 | TGTATATTCTACCCATA | TGtatattctaccCATA | 45.6 |
| 1354 | 1354_1 | ATGTATATTCTACCCATA | ATgtatattctaccCATA | 90.2 |
| 1355 | 1355_1 | ATGTATATTCTACCCAT | ATgtatattctacCCAT | 51.1 |
| 1356 | 1356_1 | GAAAACCACACAATTCCTA | GaaaaccacacaattCCTA | 58.9 |
| 1357 | 1357_1 | GAAAACCACACAATTCCT | GAaaaccacacaatTCCT | 56.4 |
| 1358 | 1358_1 | AGAAAACCACACAATTCCT | AGaaaaccacacaattCCT | 58.4 |
| 1359 | 1359_1 | CAGAAAACCACACAATTCC | CAGaaaaccacacaatTCC | 43.3 |
| 1360 | 1360_1 | AGAAAACCACACAATTCC | AGAaaaccacacaatTCC | 47.6 |
| 1361 | 1361_1 | CCAGAAAACCACACAATTC | CCAGaaaaccacacaatTC | 26.3 |
| 1362 | 1362_1 | CCAGAAAACCACACAATT | CCAGaaaaccacacaaTT | 21 |
| 1363 | 1363_1 | TCCAGAAAACCACACAAT | TCCAgaaaaccacacaAT | 47.1 |
| 1364 | 1364_1 | TTCCAGAAAACCACACAA | TTCCagaaaaccacacAA | 49.8 |
| 1364 | 1364_2 | TTCCAGAAAACCACACAA | TTCcagaaaaccacaCAA | 45.8 |
| 1365 | 1365_1 | GATATATCACTAAATCCAT | GAtatatcactaaatCCAT | 27.4 |
| 1366 | 1366_1 | GATATATCACTAAATCCA | GAtatatcactaaaTCCA | 43.7 |
| 1367 | 1367_1 | AGATATATCACTAAATCCA | AGatatatcactaaaTCCA | 37.4 |
| 1368 | 1368_1 | AGATATATCACTAAATCC | AGAtatatcactaaaTCC | 33.6 |
| 1369 | 1369_1 | TCATATATAAATTTCTCTA | TCAtatataaatttctCTA | 78 |
| 1369 | 1369_2 | TCATATATAAATTTCTCTA | TCATatataaatttctcTA | 73.1 |
| 1370 | 1370_1 | TCATATATAAATTTCTCT | TCatatataaatttCTCT | 27.9 |
| 1370 | 1370_2 | TCATATATAAATTTCTCT | TCATatataaatttctCT | 60.2 |
| 1371 | 1371_1 | AAGATCACACAACCATA | AAGAtcacacaaccaTA | 19.8 |
| 1372 | 1372_1 | TAAAAGATCACACAACCA | TAaaagatcacacaACCA | 47.5 |
| 1373 | 1373_1 | CATCACATAAAAACCCACTT | CATcacataaaaacccaCTT | 45.4 |
| 1374 | 1374_1 | CATCACATAAAAACCCACT | CAtcacataaaaaccCACT | 57.9 |
| 1375 | 1375_1 | TCATCACATAAAAACCCACT | TCatcacataaaaaccCACT | 30.1 |
| 1376 | 1376_1 | CATCACATAAAAACCCAC | CAtcacataaaaacCCAC | 61.6 |
| 1377 | 1377_1 | TCATCACATAAAAACCCAC | TCatcacataaaaacCCAC | 30.6 |
| 1378 | 1378_1 | GTCATCACATAAAAACCCAC | GTCatcacataaaaaccCAC | 24.9 |
| 1379 | 1379_1 | GTCATCACATAAAAACCCA | GTCatcacataaaaacCCA | 28.7 |
| 1380 | 1380_1 | TCATCACATAAAAACCCA | TCatcacataaaaaCCCA | 43.9 |
| 1381 | 1381_1 | CATCACATAAAAACCCA | CAtcacataaaaaCCCA | 71.5 |
| 1382 | 1382_1 | TCATCACATAAAAACCC | TCAtcacataaaaaCCC | 42.9 |
| 1383 | 1383_1 | GTCATCACATAAAAACCC | GTCatcacataaaaaCCC | 24.9 |
| 1384 | 1384_1 | AGTCATCACATAAAAACCC | AGtcatcacataaaaACCC | 35.8 |
| 1384 | 1384_2 | AGTCATCACATAAAAACCC | AGTCatcacataaaaacCC | 23 |
| 1385 | 1385_1 | TAGTCATCACATAAAAACC | TAGTcatcacataaaaaCC | 36.3 |
| 1386 | 1386_1 | AGTCATCACATAAAAACC | AGTCatcacataaaaaCC | 34.9 |
| 1387 | 1387_1 | ATGCTAAATACAAATCT | ATGCtaaatacaaatCT | 81 |
| 1388 | 1388_1 | GAAACCATTACTACAACCAA | GAaaccattactacaaCCAA | 20.1 |
| 1389 | 1389_1 | GAAACCATTACTACAACCA | GAaaccattactacaACCA | 15.9 |
| 1390 | 1390_1 | ATGAAACCATTACTACAAC | ATGAaaccattactacaAC | 45.6 |
| 1391 | 1391_1 | CATGAAACCATTACTACA | CATGaaaccattactaCA | 55.9 |
| 1392 | 1392_1 | CCATGAAACCATTACTAC | CCatgaaaccattaCTAC | 29.5 |
| 1393 | 1393_1 | CTCCCATGAAACCATTA | CTCCcatgaaaccatTA | 73.7 |
| 1394 | 1394_1 | TGCTTACTTTATACAAAA | TGCTtactttatacaaAA | 55.9 |
| 1395 | 1395_1 | ATGTTAATACTTTTTCCA | ATGttaatactttttCCA | 92.9 |
| 1396 | 1396_1 | CCTAATTTAACCCACAA | CCTaatttaacccaCAA | 32.2 |
| 1397 | 1397_1 | ATCCTAATTTAACCCACAA | ATCctaatttaacccaCAA | 38.1 |
| 1398 | 1398_1 | TCCTAATTTAACCCACAA | TCCtaatttaacccaCAA | 39.9 |
| 1399 | 1399_1 | TAATCCTAATTTAACCCACAA | TAAtcctaatttaacccaCAA | 72.8 |
| 1400 | 1400_1 | TAATCCTAATTTAACCCACA | TAatcctaatttaaccCACA | 45 |
| 1401 | 1401_1 | AATCCTAATTTAACCCACA | AATCctaatttaacccaCA | 41.2 |
| 1402 | 1402_1 | TCCTAATTTAACCCACA | TCCtaatttaacccACA | 38.3 |
| 1403 | 1403_1 | TAATCCTAATTTAACCCAC | TAatcctaatttaacCCAC | 37.5 |
| 1404 | 1404_1 | ATCCTAATTTAACCCAC | ATcctaatttaacCCAC | 34.4 |
| 1405 | 1405_1 | AATCCTAATTTAACCCAC | AAtcctaatttaacCCAC | 48.2 |
| 1406 | 1406_1 | TAATCCTAATTTAACCCA | TAatcctaatttaaCCCA | 56.5 |
| 1407 | 1407_1 | AATCCTAATTTAACCCA | AAtcctaatttaaCCCA | 71.7 |
| 1408 | 1408_1 | GTAATCCTAATTTAACCCA | GtaatcctaatttaaCCCA | 63.6 |
| 1409 | 1409_1 | TAATCCTAATTTAACCC | TAatcctaatttaACCC | 56.5 |
| 1410 | 1410_1 | GTAATCCTAATTTAACCC | GTaatcctaatttaACCC | 44 |
| 1411 | 1411_1 | AGTAATCCTAATTTAACCC | AGtaatcctaatttaaCCC | 66.2 |
| 1410 | 1410_2 | GTAATCCTAATTTAACCC | GTAatcctaatttaaCCC | 34.2 |
| 1412 | 1412_1 | AGTAATCCTAATTTAACC | AGTAatcctaatttaaCC | 42.7 |
| 1413 | 1413_1 | TCATTTATCACTACCACA | TCAtttatcactaccACA | 26.5 |
| 1414 | 1414_1 | CATCATTTATCACTACCACA | CatcatttatcactacCACA | 46 |
| 1415 | 1415_1 | CATTTATCACTACCACA | CAtttatcactacCACA | 19.4 |
| 1416 | 1416_1 | ATCATTTATCACTACCACA | ATcatttatcactacCACA | 16.8 |
| 1416 | 1416_2 | ATCATTTATCACTACCACA | ATCAtttatcactaccaCA | 14.1 |
| 1417 | 1417_1 | ACATCATTTATCACTACCACA | ACatcatttatcactaccACA | 53.4 |
| 1418 | 1418_1 | TCATTTATCACTACCAC | TCAtttatcactacCAC | 18.9 |
| 1419 | 1419_1 | ATCATTTATCACTACCAC | ATcatttatcactaCCAC | 21.8 |
| 1420 | 1420_1 | CATCATTTATCACTACCAC | CATcatttatcactacCAC | 25.1 |
| 1421 | 1421_1 | AACATCATTTATCACTACCAC | AACatcatttatcactacCAC | 30.5 |
| 1421 | 1421_2 | AACATCATTTATCACTACCAC | AacatcatttatcactaCCAC | 40.4 |
| 1420 | 1420_2 | CATCATTTATCACTACCAC | CatcatttatcactaCCAC | 34.3 |
| 1422 | 1422_1 | AACATCATTTATCACTACCA | AAcatcatttatcactACCA | 34 |
| 1423 | 1423_1 | CATCATTTATCACTACCA | CATCatttatcactacCA | 11.3 |
| 1424 | 1424_1 | TAACATCATTTATCACTACCA | TAacatcatttatcactaCCA | 63.1 |
| 1425 | 1425_1 | ACATCATTTATCACTACCA | ACATcatttatcactacCA | 19 |
| 1422 | 1422_2 | AACATCATTTATCACTACCA | AACatcatttatcactaCCA | 25 |
| 1424 | 1424_2 | TAACATCATTTATCACTACCA | TaacatcatttatcactACCA | 61.3 |
| 1425 | 1425_2 | ACATCATTTATCACTACCA | ACatcatttatcactACCA | 23.5 |
| 1426 | 1426_1 | TAACATCATTTATCACTACC | TAACatcatttatcactaCC | 33.6 |
| 1427 | 1427_1 | ACATCATTTATCACTACC | ACatcatttatcacTACC | 32.3 |
| 1428 | 1428_1 | TTAACATCATTTATCACTACC | TTAacatcatttatcactaCC | 75.5 |
| 1429 | 1429_1 | AACATCATTTATCACTACC | AACAtcatttatcactaCC | 37.3 |
| 1430 | 1430_1 | TTAACATCATTTATCACTAC | TTaacatcatttatcaCTAC | 69.1 |
| 1431 | 1431_1 | TAACATCATTTATCACTAC | TAacatcatttatcaCTAC | 66.6 |
| 1432 | 1432_1 | ATTAACATCATTTATCACTAC | ATtaacatcatttatcaCTAC | 84.2 |
| 1432 | 1432_2 | ATTAACATCATTTATCACTAC | ATtaacatcAtttatcaCTAC | 62.8 |
| 1433 | 1433_1 | ATTAACATCATTTATCACTA | ATTaacatcatttatcaCTA | 81.3 |
| 1434 | 1434_1 | TTAACATCATTTATCACTA | TTAacatcatttatcaCTA | 74.5 |
| 1435 | 1435_1 | TAATTAACATCATTTATCACT | TAattaacatcatttatCACT | 84.3 |
| 1435 | 1435_2 | TAATTAACATCATTTATCACT | TAattaacaTcatttatCACT | 43.3 |
| 1436 | 1436_1 | CTAATTAACATCATTTATCAC | CTaattaacatcatttaTCAC | 81.4 |
| 1436 | 1436_2 | CTAATTAACATCATTTATCAC | CTaattaacAtcatttaTCAC | 46.7 |
| 1437 | 1437_1 | CCTAATTAACATCATTTATCA | CCtaattaacatcatttaTCA | 93.8 |
| 1438 | 1438_1 | CTAATTAACATCATTTATCA | CTAattaacatcatttaTCA | 89.6 |
| 1439 | 1439_1 | CCTAATTAACATCATTTATC | CCTAattaacatcatttaTC | 69.4 |
| 1440 | 1440_1 | CCCTAATTAACATCATTTATC | CCctaattaacatcatttATC | 86.3 |
| 1441 | 1441_1 | CCTAATTAACATCATTTAT | CCTaattaacatcattTAT | 87.4 |
| 1442 | 1442_1 | CCTAATTAACATCATTTA | CCTAattaacatcattTA | 66 |
| 1443 | 1443_1 | CCCTAATTAACATCATTTA | CCCtaattaacatcattTA | 88.7 |
| 1444 | 1444_1 | GCCCTAATTAACATCATTT | GCCctaattaacatcatTT | 87.9 |
| 1445 | 1445_1 | CCCTAATTAACATCATTT | CCCTaattaacatcatTT | 75.6 |
| 1446 | 1446_1 | CGGCCCTAATTAACAT | CGGCcctaattaacAT | 103 |
| 1447 | 1447_1 | CTCGGCCCTAATTAA | CTCggccctaatTAA | 57.4 |
| 1448 | 1448_1 | CACATATAACATATAAACAC | CACAtataacatataaacaCA | 61.7 |
| | | A | | |
| 1449 | 1449_1 | TCACATATAACATATAAACA | TCAcatataacatataaaCAC | 43.6 |
| | | C | | |
| 1450 | 1450_1 | ACTATCACATATAACATATA | ACTAtcacatataacataTA | 58.5 |
| 1451 | 1451_1 | CACTATCACATATAACATATA | CACTatcacatataacataTA | 28.1 |
| 1452 | 1452_1 | CACTATCACATATAACATAT | CACtatcacatataacaTAT | 52 |
| 1453 | 1453_1 | CACTATCACATATAACATA | CACTatcacatataacaTA | 24.3 |
| 1454 | 1454_1 | CACTATCACATATAACAT | CACtatcacatataaCAT | 40.1 |
| 1455 | 1455_1 | CACTATCACATATAACA | CACTatcacatataaCA | 27 |
| 1456 | 1456_1 | CAAAGTTTTCCCATTAC | CAaagttttcccaTTAC | 21 |
| 1457 | 1457_1 | ACAAAGTTTTCCCATTA | ACAaagttttcccaTTA | 20.5 |
| 1458 | 1458_1 | TCAGTCCAACATAACTC | TCAGtccaacataacTC | 15.2 |
| 1459 | 1459_1 | CAGTCCAACATAACTC | CAGtccaacataaCTC | 23.5 |
| 1460 | 1460_1 | ATCAGTCCAACATAACTC | ATCAgtccaacataacTC | 13.7 |
| 1461 | 1461_1 | ATCAGTCCAACATAACT | ATCAgtccaacataaCT | 15.9 |
| 1462 | 1462_1 | TAAACATTAAACCCTCCCAA | TAaacattaaaccctccCAAA | 87 |
| | | A | | |
| 1463 | 1463_1 | AACATTAAACCCTCCCAA | AAcattaaaccctcCCAA | 68.4 |
| 1464 | 1464_1 | TAAACATTAAACCCTCCCAA | TaaacattaaaccctcCCAA | 79.2 |
| 1465 | 1465_1 | AAACATTAAACCCTCCCAA | AAacattaaaccctcCCAA | 70.8 |
| 1466 | 1466_1 | TATAAACATTAAACCCTCCCA | TAtaaacattaaaccctccCA | 94 |
| 1467 | 1467_1 | AACATTAAACCCTCCC | AAcattaaacccTCCC | 78.3 |
| 1468 | 1468_1 | AAACATTAAACCCTCCC | AAacattaaacccTCCC | 89.4 |
| 1469 | 1469_1 | TAAACATTAAACCCTCCC | TAAacattaaaccctCCC | 72.9 |
| 1470 | 1470_1 | ATAAACATTAAACCCTCCC | AtaaacattaaacccTCCC | 86 |
| 1471 | 1471_1 | TATAAACATTAAACCCTCC | TAtaaacattaaaccCTCC | 91.1 |
| 1472 | 1472_1 | TAAACATTAAACCCTCC | TAaacattaaaccCTCC | 82.2 |
| 1473 | 1473_1 | ACTATAAACATTAAACCCTCC | ActataaacattaaaccCTCC | 86.5 |
| 1474 | 1474_1 | ATAAACATTAAACCCTCC | ATaaacattaaaccCTCC | 88.4 |
| 1475 | 1475_1 | AACTATAAACATTAAACCCTC | AActataaacattaaacCCTC | 92.6 |
| 1476 | 1476_1 | CTATAAACATTAAACCCTC | CTataaacattaaacCCTC | 82.9 |
| 1477 | 1477_1 | ACTATAAACATTAAACCCTC | ACtataaacattaaacCCTC | 89.8 |
| 1478 | 1478_1 | AAACTATAAACATTAAACCC | AAactataaacattaaaCCCT | 98.9 |
| | | T | | |
| 1479 | 1479_1 | CTATAAACATTAAACCCT | CTataaacattaaaCCCT | 82.2 |
| 1480 | 1480_1 | ACTATAAACATTAAACCCT | ACtataaacattaaaCCCT | 86.6 |
| 1481 | 1481_1 | AACTATAAACATTAAACCCT | AActataaacattaaaCCCT | 89.5 |
| 1482 | 1482_1 | GCTTTAAACTATAAACATT | GCtttaaactataaaCATT | 58.2 |
| 1483 | 1483_1 | TGCTTTAAACTATAAACA | TGCTttaaactataaaCA | 57.2 |
| 1484 | 1484_1 | CAGATTTATCACTATTA | CAGAtttatcactatTA | 15.4 |
| 1485 | 1485_1 | TCACAGCCTATCACCAC | TCacagcctatcacCAC | 47.3 |
| 1485 | 1485_2 | TCACAGCCTATCACCAC | TCAcagcctatcaccAC | 46.3 |
| 1486 | 1486_1 | ATCACAGCCTATCACCA | AtcacagcctatcACCA | 56.9 |
| 1486 | 1486_2 | ATCACAGCCTATCACCA | ATCacagcctatcacCA | 23.7 |
| 1487 | 1487_1 | AATCACAGCCTATCACC | AATCacagcctatcaCC | 32.9 |
| 1487 | 1487_2 | AATCACAGCCTATCACC | AatcacagcctatCACC | 52.2 |
| 1488 | 1488_1 | ATCACAGCCTATCACC | AtcacagcctatCACC | 60.1 |
| 1489 | 1489_1 | GCGTCACCCAAATCAC | GCgtcacccaaatCAC | 11 |
| 1490 | 1490_1 | AGCGTCACCCAAATCA | AG^{m}cgtcacccaaaTCA | 17.4 |
| 1491 | 1491_1 | AGCGTCACCCAAATC | AG^{m}cgtcacccaAATC | 18.8 |
| 1492 | 1492_1 | CAGATCCTAAAATCACT | CAGAtcctaaaatcaCT | 71.8 |
| 1493 | 1493_1 | TCAGATCCTAAAATCAC | TCAgatcctaaaatCAC | 66.2 |
| 1494 | 1494_1 | AGTAAAACCAATCATCAT | AGTaaaaccaatcatCAT | 30.8 |
| 1495 | 1495_1 | AGTAAAACCAATCATCA | AGTaaaaccaatcaTCA | 24.2 |
| 1496 | 1496_1 | CCCTTCCATCTCTACTAAAA | CccttccatctctactaaAA | 89.7 |
| 1497 | 1497_1 | ATAACTACATAACAAACCCA | ATaactacataacaaaCCCA | 69.1 |
| 1498 | 1498_1 | AATAACTACATAACAAACCC | AAtaactacataacaaaCCCA | 77.8 |
| | | A | | |
| 1499 | 1499_1 | AACTACATAACAAACCCA | AActacataacaaaCCCA | 62.9 |
| 1500 | 1500_1 | TAACTACATAACAAACCCA | TAactacataacaaaCCCA | 65 |
| 1501 | 1501_1 | ACTACATAACAAACCCA | ACtacataacaaaCCCA | 60.4 |
| 1502 | 1502_1 | CAATAACTACATAACAAACC | CAAtaactacataacaaaCCC | 72.6 |
| | | C | | |
| 1503 | 1503_1 | ATAACTACATAACAAACCC | ATAactacataacaaaCCC | 60.2 |
| 1504 | 1504_1 | ACAATAACTACATAACAAAC | ACAataactacataacaaACC | 78.5 |
| | | C | | |
| 1504 | 1504_2 | ACAATAACTACATAACAAAC | ACAAtaactacataacaaaCC | 80.9 |
| | | C | | |
| 1505 | 1505_1 | TGAATTCACAATAACTACA | TGaattcacaataacTACA | 38.1 |
| 1506 | 1506_1 | GCACATTTTTCTTAAACT | GCACatttttcttaaaCT | 62.2 |
| 1507 | 1507_1 | GCTATACCTAAAACAATCT | GCTatacctaaaacaaTCT | 62.2 |
| 1508 | 1508_1 | GCTATACCTAAAACAATC | GCTAtacctaaaacaaTC | 68.9 |
| 1509 | 1509_1 | CCCTTGTAACTAAAAAT | CCCTtgtaactaaaaAT | 100 |
| 1510 | 1510_1 | CCCCTTGTAACTAAAAA | CCCCttgtaactaaaAA | 86.1 |
| 1511 | 1511_1 | CCCCTTGTAACTAAAA | CCCCttgtaactaaAA | 101 |
| 1512 | 1512_1 | ACCCCTTGTAACTAAA | ACCCcttgtaactaAA | 88.8 |
| 1513 | 1513_1 | CACCCCTTGTAACTAA | CAccccttgtaaCTAA | 80.4 |
| 1514 | 1514_1 | ACACCCCTTGTAACTA | ACACcccttgtaacTA | 72.4 |
| 1515 | 1515_1 | GCTAAAACTAATCATCT | GCTaaaactaatcaTCT | 72.2 |
| 1516 | 1516_1 | GGCTAAAACTAATCAT | GGCtaaaactaatCAT | 70.8 |
| 1517 | 1517_1 | TTACCCTTCATATATACATCT | TtacccttcatatatacaTCT | 89.4 |
| 1518 | 1518_1 | ATTACCCTTCATATATACATC | AttacccttcatatataCATC | 82.4 |
| 1519 | 1519_1 | TTACCCTTCATATATACATC | TTAcccttcatatatacATC | 56.3 |
| 1520 | 1520_1 | CATTACCCTTCATATATACAT | CAttacccttcatatataCAT | 84.2 |
| 1521 | 1521_1 | TTACCCTTCATATATACAT | TTAcccttcatatataCAT | 55.3 |
| 1522 | 1522_1 | ATTACCCTTCATATATACAT | ATTacccttcatatataCAT | 49.3 |
| 1523 | 1523_1 | ACATTACCCTTCATATATACA | ACAttacccttcatatataCA | 55.2 |
| 1523 | 1523_2 | ACATTACCCTTCATATATACA | AcattacccttcatataTACA | 63.4 |
| 1524 | 1524_1 | TTACCCTTCATATATACA | TTACccttcatatataCA | 46.9 |
| 1525 | 1525_1 | CATTACCCTTCATATATACA | CattacccttcatataTACA | 66 |
| 1526 | 1526_1 | ATTACCCTTCATATATACA | ATTAcccttcatatataCA | 36.7 |
| 1527 | 1527_1 | ATTACCCTTCATATATAC | ATTacccttcatataTAC | 46.6 |
| 1528 | 1528_1 | TTACCCTTCATATATAC | TTAcccttcatataTAC | 56.9 |
| 1529 | 1529_1 | CATTACCCTTCATATATAC | CATtacccttcatataTAC | 63.4 |
| 1530 | 1530_1 | ACATTACCCTTCATATATAC | ACAttacccttcatataTAC | 34.5 |
| 1531 | 1531_1 | TACATTACCCTTCATATATAC | TAcattacccttcatataTAC | 76.9 |
| 1532 | 1532_1 | CATTACCCTTCATATATA | CAttacccttcataTATA | 76.5 |
| 1533 | 1533_1 | TACATTACCCTTCATATATA | TACattacccttcatatATA | 36.5 |
| 1534 | 1534_1 | ATTACCCTTCATATATA | ATtacccttcataTATA | 78 |
| 1535 | 1535_1 | ACATTACCCTTCATATATA | ACattacccttcataTATA | 59.5 |
| 1536 | 1536_1 | CATTACCCTTCATATAT | CATtacccttcataTAT | 73.7 |
| 1537 | 1537_1 | ACATTACCCTTCATATAT | ACAttacccttcataTAT | 46.1 |
| 1538 | 1538_1 | TACATTACCCTTCATATAT | TACattacccttcataTAT | 36.9 |
| 1539 | 1539_1 | ACATTACCCTTCATATA | ACattacccttcaTATA | 54.2 |
| 1540 | 1540_1 | TACATTACCCTTCATATA | TAcattacccttcaTATA | 71.5 |
| 1541 | 1541_1 | TACATTACCCTTCATAT | TACattacccttcaTAT | 34.5 |
| 1542 | 1542_1 | GATTCTTATACTTACTA | GATtcttatacttaCTA | 46.2 |
| 1543 | 1543_1 | TGATTCTTATACTTACT | TGattcttatactTACT | 45.7 |
| 1544 | 1544_1 | ATGATTCTTATACTTACT | ATGAttcttatacttaCT | 54 |
| 1545 | 1545_1 | GCCTCATTTTTACCTTT | GCctcatttttaccTTT | 82.6 |
| 1546 | 1546_1 | ACCAATCTTCTATTTTA | ACCAatcttctatttTA | 94.8 |
| 1547 | 1547_1 | CAACCAATCTTCTATTTTA | CAACcaatcttctatttTA | 90.3 |
| 1548 | 1548_1 | GCAACCAATCTTCTATTTT | GCAAccaatcttctattTT | 88.3 |
| 1549 | 1549_1 | GCAACCAATCTTCTATTT | GCAaccaatcttctaTTT | 85 |
| 1550 | 1550_1 | GCAACCAATCTTCTATT | GCaaccaatcttcTATT | 87.3 |
| 1551 | 1551_1 | TGCAACCAATCTTCTATT | TGCaaccaatcttctaTT | 90.2 |
| 1552 | 1552_1 | TAACTGCAACCAATCTT | TAactgcaaccaaTCTT | 88.2 |
| 1553 | 1553_1 | TGAATACAACACACATCA | TGAatacaacacacaTCA | 97.4 |
| 1554 | 1554_1 | ATGAATACAACACACATCA | ATGAatacaacacacatCA | 84.4 |
| 1555 | 1555_1 | TAAAAATATAACTACTCCT | TAaaaatataactacTCCT | 99.8 |
| 1556 | 1556_1 | GTAAAAATATAACTACTCC | GTaaaaatataactaCTCC | 93.7 |
| 1557 | 1557_1 | TCAACTGATACCCACAA | TCAactgatacccaCAA | 57.7 |
| 1558 | 1558_1 | TGTCTTAACATTTTTCTT | TGTCttaacatttttcTT | 63.1 |
| 1559 | 1559_1 | CCACTTCAAACTTTTAATTAA | CCActtcaaacttttaatTAA | 85 |
| 1560 | 1560_1 | CCACTTCAAACTTTTAATTA | CCACttcaaacttttaatTA | 84.9 |
| 1561 | 1561_1 | CCCACTTCAAACTTTTAATTA | CCcacttcaaacttttaaTTA | 88.7 |
| 1562 | 1562_1 | CCACTTCAAACTTTTAATT | CCACttcaaacttttaaTT | 79.1 |
| 1563 | 1563_1 | CCCACTTCAAACTTTTAATT | CCCacttcaaacttttaaTT | 86.2 |
| 1564 | 1564_1 | ACCCACTTCAAACTTTTAATT | ACCcacttcaaacttttaaTT | 100 |
| 1565 | 1565_1 | CCACTTCAAACTTTTAAT | CCACttcaaacttttaAT | 85.3 |
| 1566 | 1566_1 | ACCCACTTCAAACTTTTAAT | ACCcacttcaaacttttAAT | 88.8 |
| 1567 | 1567_1 | AACCCACTTCAAACTTTTAAT | AACCcacttcaaacttttaAT | 92.3 |
| 1568 | 1568_1 | CCCACTTCAAACTTTTAA | CCCacttcaaactttTAA | 79.9 |
| 1569 | 1569_1 | ACCCACTTCAAACTTTTAA | ACCcacttcaaactaTAA | 82.5 |
| 1570 | 1570_1 | CCCACTTCAAACTTTTA | CCCacttcaaactttTA | 79.6 |
| 1571 | 1571_1 | ACCCACTTCAAACTTTTA | ACCcacttcaaacttTTA | 77.2 |
| 1572 | 1572_1 | AACCCACTTCAAACTTTTA | AACCcacttcaaactttTA | 86.2 |
| 1573 | 1573_1 | ACCCACTTCAAACTTTT | ACCCacttcaaacttTT | 93.3 |
| 1574 | 1574_1 | AACCCACTTCAAACTTTT | AACCcacttcaaacttTT | 82.7 |
| 1575 | 1575_1 | AACCCACTTCAAACTTT | AACCcacttcaaactTT | 85.8 |
| 1576 | 1576_1 | GGACTCTATTAATCAA | GGActctattaatCAA | 91.7 |
| 1577 | 1577_1 | GAATATTCTACTCTTCT | GAatattctactcTTCT | 95.3 |
| 1578 | 1578_1 | CTGTATTTACCAATTCAA | CTGtatttaccaattCAA | 90.8 |
| 1579 | 1579_1 | CTGTATTTACCAATTCA | CTGTatttaccaattCA | 88.7 |
| 1580 | 1580_1 | ACTGTATTTACCAATTCA | ACTGtatttaccaattCA | 97.3 |
| 1581 | 1581_1 | ACTGTATTTACCAATTC | ACTGtatttaccaatTC | 104 |
| 1582 | 1582_1 | CACTGTATTTACCAATT | CACTgtatttaccaaTT | 91.1 |
| 1583 | 1583_1 | TCACTGTATTTACCAAT | TCACtgtatttaccaAT | 98.6 |
| 1584 | 1584_1 | CCAACTACTTTACTTTTCAAA | CCaactactttacttttCAAA | 84.3 |
| 1585 | 1585_1 | CCAACTACTTTACTTTTCAA | CCaactactttactttTCAA | 80 |
| 1586 | 1586_1 | ACCAACTACTTTACTTTTCAA | ACcaactactttactttTCAA | 85.1 |
| 1585 | 1585_2 | CCAACTACTTTACTTTTCAA | CCAactactttacttttCAA | 75.2 |
| 1587 | 1587_1 | CCAACTACTTTACTTTTCA | CCAactactttacttttCA | 71.9 |
| 1588 | 1588_1 | TACCAACTACTTTACTTTTCA | TaccaactactttacttTTCA | 82.8 |
| 1587 | 1587_2 | CCAACTACTTTACTTTTCA | CCAactactttactttTCA | 67.7 |
| 1589 | 1589_1 | ACCAACTACTTTACTTTTCA | ACcaactactttactttTCA | 84 |
| 1590 | 1590_1 | TACCAACTACTTTACTTTTC | TACcaactactttacttTTC | 75.3 |
| 1591 | 1591_1 | GTACCAACTACTTTACTTT | GTACcaactactttactTT | 75.8 |
| 1592 | 1592_1 | GTACCAACTACTTTACTT | GTAccaactactttaCTT | 65.7 |
| 1593 | 1593_1 | GTACCAACTACTTTACT | GTACcaactactttaCT | 74.5 |
| 1594 | 1594_1 | TGTACCAACTACTTTACT | TGtaccaactacttTACT | 87.1 |
| 1595 | 1595_1 | TTGTACCAACTACTTTAC | TTGtaccaactacttTAC | 73.3 |
| 1596 | 1596_1 | GTACCAACTACTTTAC | GTAccaactacttTAC | 72.5 |
| 1597 | 1597_1 | TGTACCAACTACTTTAC | TGTaccaactacttTAC | 66 |
| 1598 | 1598_1 | TTGTACCAACTACTTTA | TTGTaccaactacttTA | 49.3 |
| 1599 | 1599_1 | ATTTCATTTTTCTTTTAATA | ATTtcatttttcttttaATA | 98.6 |
| 1599 | 1599_2 | ATTTCATTTTTCTTTTAATA | ATTTcatttttcttttaaTA | 90.7 |
| 1600 | 1600_1 | CCTAATTTCATTTTTCTTTT | CCtaatttcatttttcTTTT | 69.2 |
| 1601 | 1601_1 | TCCTAATTTCATTTTTCTTT | TCctaatttcatttttCTTT | 47 |
| 1602 | 1602_1 | TTCTTCATTATACCATCAAAT | TTCTtcattataccatcaaAT | 29.4 |
| 1603 | 1603_1 | TTTCTTCATTATACCATCAAA | TTTCttcattataccatcaAA | 24.1 |
| 1604 | 1604_1 | TTTTCTTCATTATACCATCAA | TTttcttcattataccaTCAA | 14.3 |
| 1605 | 1605_1 | TCTTCATTATACCATCAA | TCttcattataccaTCAA | 5.02 |
| 1606 | 1606_1 | TTTCTTCATTATACCATCAA | TTtcttcattataccaTCAA | 21.2 |
| 1607 | 1607_1 | TTCTTCATTATACCATCAA | TTCttcattataccatCAA | 5.83 |
| 1608 | 1608_1 | ATATTTTCTTCATTATACCAT | AtattttcttcattataCCAT | 76.1 |
| 1609 | 1609_1 | ATATTTTCTTCATTATACCA | ATattttcttcattataCCA | 40.2 |
| 1610 | 1610_1 | AATATTTTCTTCATTATACC | AAATattacttcattataCCA | 37 |
| 1611 | 1611_1 | AAATATTTTCTTCATTATACC | AAatattttcttcattaTACC | 23.4 |
| 1612 | 1612_1 | ATATTTTCTTCATTATACC | ATattttcttcattaTACC | 14.2 |
| 1613 | 1613_1 | AATATTTTCTTCATTATACC | AATAttttcttcattataCC | 68 |
| 1614 | 1614_1 | TAAATATTTTCTTCATTATA | TAaatattttcttcatTATA | 96.8 |
| 1615 | 1615_1 | TTTTCCTTCATCTACTTCT | TTTtccttcatctacttCT | 42.8 |
| 1616 | 1616_1 | ATTTTCCTTCATCTACTTCT | ATtttccttcatctacttCT | 76 |
| 1617 | 1617_1 | AATTTTCCTTCATCTACTTC | AATTttccttcatctactTC | 54.9 |
| 1618 | 1618_1 | AGAATTTTCCTTCATCTA | AgaattttccttcaTCTA | 58 |
| 1619 | 1619_1 | CAGAATTTTCCTTCATCT | CAgaattttccttcATCT | 23.5 |
| 1620 | 1620_1 | TCAGAATTTTCCTTCATC | TCAgaattttccttcaTC | 29.7 |
| 1621 | 1621_1 | CTAGAAATATCTCACATT | CTAGaaatatctcacaTT | 64.6 |
| 1622 | 1622_1 | CTAGAAATATCTCACAT | CTAgaaatatctcaCAT | 75.5 |
| 1623 | 1623_1 | ACTAGAAATATCTCACA | ACTAgaaatatctcaCA | 53.2 |
| 1624 | 1624_1 | ATTAGCCATTAATCTAT | ATtagccattaatCTAT | 71.9 |
| 1625 | 1625_1 | TTGTTACAAAATAATCCA | TTgttacaaaataaTCCA | 12 |
| 1625 | 1625_2 | TTGTTACAAAATAATCCA | TTGttacaaaataatCCA | 23.8 |
| 1626 | 1626_1 | TTATTTTTTACATTAACTA | TTAttttttacattaaCTA | 92.1 |
| 1627 | 1627_1 | TGCCAAAATACTAACATCA | TGCcaaaatactaacaTCA | 32 |
| 1628 | 1628_1 | GCCAAAATACTAACATCA | GCCaaaatactaacaTCA | 27.8 |
| 1629 | 1629_1 | TGCCAAAATACTAACATC | TGCCaaaatactaacaTC | 61.5 |
| 1630 | 1630_1 | GAGTACAACACTTACA | GAGTacaacacttaCA | 31.8 |
| 1631 | 1631_1 | CACATCCATTCATTTTAT | CACatccattcatttTAT | 30.6 |
| 1632 | 1632_1 | CCACATCCATTCATTTTAT | CCAcatccattcattttAT | 21.7 |
| 1633 | 1633_1 | CCACATCCATTCATTTTA | CCacatccattcattTTA | 20 |
| 1634 | 1634_1 | TATGCCACATCCATTCAT | TatgccacatccattCAT | 47 |
| 1635 | 1635_1 | TTATGCCACATCCATTCA | TtatgccacatccaTTCA | 20.7 |
| 1636 | 1636_1 | TATGCCACATCCATTCA | TAtgccacatccattCA | 43.3 |
| 1637 | 1637_1 | TTATGCCACATCCATTC | TtatgccacatccATTC | 19.5 |
| 1638 | 1638_1 | ATTATGCCACATCCATT | ATtatgccacatcCATT | 25.1 |
| 1639 | 1639_1 | AGTTTCATATTTTTAATC | AGTttcatatttttaATC | 65.9 |
| 1640 | 1640_1 | ATCACTGCACACTTTCC | ATCactgcacactttCC | 12.9 |
| 1641 | 1641_1 | AAGCTCTTTCCAAATTCT | AAGCtctttccaaattCT | 34.6 |
| 1642 | 1642_1 | TAGTTCTTAACTCTTCTC | TagttcttaactctTCTC | 19.2 |
| 1643 | 1643_1 | TTAGTTCTTAACTCTTC | TTAGttcttaactctTC | 18 |
| 1644 | 1644_1 | AGCTTCAAATACTCAAA | AGCTtcaaatactcaAA | 74.5 |
| 1645 | 1645_1 | TTTCAAAGCCACACCTA | TttcaaagccacaCCTA | 66.9 |
| 1646 | 1646_1 | AATATCCTCATTACCCATT | AATAtcctcattacccaTT | 52.3 |
| 1647 | 1647_1 | TATCCTCATTACCCATT | TAtcctcattaccCATT | 53.4 |
| 1647 | 1647_2 | TATCCTCATTACCCATT | TATCctcattacccaTT | 22.3 |
| 1648 | 1648_1 | ATATCCTCATTACCCATT | ATAtcctcattacccATT | 55.8 |
| 1649 | 1649_1 | AATATCCTCATTACCCAT | AAtatcctcattacCCAT | 46.1 |
| 1650 | 1650_1 | TAATATCCTCATTACCCAT | TAAtatcctcattaccCAT | 58.3 |
| 1651 | 1651_1 | TTAATATCCTCATTACCCAT | TTaatatcctcattaccCAT | 61.8 |
| 1652 | 1652_1 | ATATCCTCATTACCCAT | ATAtcctcattaccCAT | 56.2 |
| 1653 | 1653_1 | AATATCCTCATTACCCA | AAtatcctcattaCCCA | 49.7 |
| 1654 | 1654_1 | TAATATCCTCATTACCCA | TAATatcctcattaccCA | 45.6 |
| 1655 | 1655_1 | TTTAATATCCTCATTACCCA | TttaatatcctcattacCCA | 67.5 |
| 1656 | 1656_1 | TTAATATCCTCATTACCCA | TTaatatcctcattacCCA | 36 |
| 1656 | 1656_2 | TTAATATCCTCATTACCCA | TTAAtatcctcattaccCA | 57.9 |
| 1654 | 1654_2 | TAATATCCTCATTACCCA | TAAtatcctcattacCCA | 40 |
| 1653 | 1653_2 | AATATCCTCATTACCCA | AATatcctcattacCCA | 44.8 |
| 1657 | 1657_1 | ATTTAATATCCTCATTACCC | AtttaatatcctcattaCCC | 59.9 |
| 1658 | 1658_1 | TAATATCCTCATTACCC | TAATatcctcattacCC | 32.9 |
| 1659 | 1659_1 | TTAATATCCTCATTACCC | TTAAtatcctcattacCC | 42 |
| 1660 | 1660_1 | TTTAATATCCTCATTACCC | TttaatatcctcattACCC | 41.1 |
| 1661 | 1661_1 | AATTTAATATCCTCATTACCC | AatttaatatcctcattaCCC | 61 |
| 1662 | 1662_1 | TTTAATATCCTCATTACC | TTTAatatcctcattaCC | 60.6 |
| 1663 | 1663_1 | AATTTAATATCCTCATTACC | AAtttaatatcctcatTACC | 58.8 |
| 1664 | 1664_1 | TTAATATCCTCATTACC | TTaatatcctcatTACC | 42.3 |
| 1665 | 1665_1 | AAATTTAATATCCTCATTACC | AAatttaatatcctcatTACC | 55.9 |
| 1666 | 1666_1 | ATTTAATATCCTCATTACC | ATttaatatcctcatTACC | 55.5 |
| 1667 | 1667_1 | TAAATTTAATATCCTCATTAC | TAaatttaatatcctcaTTAC | 78 |
| 1668 | 1668_1 | TTAAATTTAATATCCTCATTA | TTAaatttaatatcctcaTTA | 95.2 |
| 1669 | 1669_1 | CTTAAATTTAATATCCTCATT | CTtaaatttaatatcctCATT | 73.2 |
| 1670 | 1670_1 | TCTTAAATTTAATATCCTCAT | TCttaaatttaatatccTCAT | 46.8 |
| 1671 | 1671_1 | TCTTAAATTTAATATCCTCA | TCttaaatttaatatcCTCA | 29.8 |
| 1672 | 1672_1 | TTCTTAAATTTAATATCCTCA | TTCttaaatttaatatccTCA | 35 |
| 1673 | 1673_1 | TTCTTAAATTTAATATCCTC | TTcttaaatttaatatCCTC | 36.2 |
| 1674 | 1674_1 | TCTTAAATTTAATATCCTC | TCttaaatttaatatCCTC | 25.1 |
| 1675 | 1675_1 | TTCTTAAATTTAATATCCT | TTCttaaatttaatatCCT | 46.9 |
| 1676 | 1676_1 | TCTTAAATTTAATATCCT | TCttaaatttaataTCCT | 50.9 |
| 1677 | 1677_1 | AATAGCCTTTATTCTAC | AAtagcctttattCTAC | 33.6 |
| 1678 | 1678_1 | CAGCAACAATTATTAATA | CAGCaacaattattaaTA | 70.5 |
| 1679 | 1679_1 | CCAGCAACAATTATTAAT | CCAGcaacaattattaAT | 64.2 |
| 1680 | 1680_1 | ACCAGCAACAATTATTAA | ACCagcaacaattatTAA | 20.5 |
| 1680 | 1680_2 | ACCAGCAACAATTATTAA | ACCAgcaacaattattAA | 39.7 |
| 1681 | 1681_1 | ACCAGCAACAATTATTA | ACCAgcaacaattatTA | 39.4 |
| 1682 | 1682_1 | TACCAGCAACAATTATT | TACCagcaacaattaTT | 26.4 |
| 1683 | 1683_1 | CCCCAAATCTAAAACACTTC | CCccaaatctaaaacacTTC | 79.4 |
| 1684 | 1684_1 | AACCCCAAATCTAAAACACT | AACCccaaatctaaaacacTT | 82 |
| | | T | | |
| 1685 | 1685_1 | CCCCAAATCTAAAACACTT | CCCcaaatctaaaacacTT | 86.4 |
| 1686 | 1686_1 | AACCCCAAATCTAAAACACT | AACCccaaatctaaaacaCT | 75.2 |
| 1687 | 1687_1 | ACCCCAAATCTAAAACACT | ACcccaaatctaaaaCACT | 72.5 |
| 1688 | 1688_1 | ACCCCAAATCTAAAACAC | ACCccaaatctaaaaCAC | 80.9 |
| 1689 | 1689_1 | GCAAATATTCACAAATCCT | GCAaatattcacaaatCCT | 20.7 |
| 1689 | 1689_2 | GCAAATATTCACAAATCCT | GCaaatattcacaaaTCCT | 29.3 |
| 1690 | 1690_1 | ACTATTTAACACACATTATCA | ACTatttaacacacattaTCA | 36.6 |
| 1691 | 1691_1 | CTATTTAACACACATTATCA | CTAtttaacacacattaTCA | 49.6 |
| 1692 | 1692_1 | TACTATTTAACACACATTATC | TACTatttaacacacattaTC | 52.4 |
| 1693 | 1693_1 | ACTATTTAACACACATTATC | ACTAtttaacacacattaTC | 51.8 |
| 1694 | 1694_1 | TACTATTTAACACACATTAT | TACtatttaacacacatTAT | 91.1 |
| 1695 | 1695_1 | CTACTATTTAACACACATTAT | CTActatttaacacacatTAT | 72.7 |
| 1696 | 1696_1 | CTACTATTTAACACACATTA | CTACtatttaacacacatTA | 47.4 |
| 1697 | 1697_1 | ACTACTATTTAACACACATTA | ACTActatttaacacacatTA | 38.3 |
| 1698 | 1698_1 | CTACTATTTAACACACATT | CTACtatttaacacacaTT | 41.6 |
| 1699 | 1699_1 | ACTACTATTTAACACACATT | ACtactatttaacacaCATT | 40.3 |
| 1700 | 1700_1 | ACTACTATTTAACACACAT | ACTactatttaacacaCAT | 36.8 |
| 1701 | 1701_1 | CTACTATTTAACACACA | CTACtatttaacacaCA | 45.9 |
| 1702 | 1702_1 | ACTACTATTTAACACACA | ACTActatttaacacaCA | 32.6 |
| 1703 | 1703_1 | TATAGACCCTTAATATT | TATAgacccttaataTT | 41.4 |
| 1704 | 1704_1 | TTATAGACCCTTAATAT | TTAtagacccttaaTAT | 68.5 |
| 1705 | 1705_1 | CATCACAAAATAACCTATCAT | CAtcacaaaataacctaTCAT | 86.8 |
| 1706 | 1706_1 | TCATCACAAAATAACCTATCA | TCAtcacaaaataacctaTCA | 67.4 |
| 1707 | 1707_1 | TTCATCACAAAATAACCTATC | TTCAtcacaaaataacctaTC | 49 |
| 1708 | 1708_1 | TTCATCACAAAATAACCTA | TTcatcacaaaataaCCTA | 76.4 |
| 1709 | 1709_1 | TTTCATCACAAAATAACCTA | TTtcatcacaaaataaCCTA | 88.6 |
| 1710 | 1710_1 | TCATCACAAAATAACCTA | TCatcacaaaataaCCTA | 59.2 |
| 1711 | 1711_1 | TTTTCATCACAAAATAACCTA | TTttcatcacaaaataaCCTA | 86.1 |
| 1712 | 1712_1 | ATTTTCATCACAAAATAACCT | ATTttcatcacaaaataaCCT | 64.8 |
| 1713 | 1713_1 | TATTTTCATCACAAAATAACC | TATTttcatcacaaaataaCC | 76.9 |
| 1713 | 1713_2 | TATTTTCATCACAAAATAACC | TATTttcatcaCaaaataaCC | 56 |
| 1714 | 1714_1 | GTATTTTCATCACAAAATA | GTATtttcatcacaaaaTA | 47 |
| 1715 | 1715_1 | TTACCTAGATCACTCC | TtacctagatcaCTCC | 73.1 |
| 1716 | 1716_1 | CTTACCTAGATCACTC | CTTacctagatcaCTC | 81.5 |
| 1717 | 1717_1 | CCTTACCTAGATCACT | CCTtacctagatcaCT | 95.9 |
| 1718 | 1718_1 | TAACTGCTCCTTAATCC | TAActgctccttaatCC | 34.8 |
| 1719 | 1719_1 | TCTAGCAATCCTCTCCT | TCtagcaatcctctcCT | 64.2 |
| 1720 | 1720_1 | TTCTAGCAATCCTCTCC | TtctagcaatcctcTCC | 70.4 |
| 1721 | 1721_1 | TTTTCACCTACTAATATTCAT | TTttcacctactaatatTCAT | 55.3 |
| 1722 | 1722_1 | TTTCACCTACTAATATTCAT | TTtcacctactaatatTCAT | 66.2 |
| 1723 | 1723_1 | TTCACCTACTAATATTCAT | TTCacctactaatattCAT | 17.2 |
| 1724 | 1724_1 | TCACCTACTAATATTCAT | TCAcctactaatattCAT | 23.5 |
| 1725 | 1725_1 | TCACCTACTAATATTCA | TCAcctactaatatTCA | 21.1 |
| 1726 | 1726_1 | TTTCACCTACTAATATTCA | TTTCacctactaatattCA | 16.7 |
| 1727 | 1727_1 | TTTTCACCTACTAATATTCA | TTttcacctactaataTTCA | 31.3 |
| 1728 | 1728_1 | TTTTTCACCTACTAATATTCA | TTtttcacctactaataTTCA | 45.3 |
| 1729 | 1729_1 | TTCACCTACTAATATTCA | TTCAcctactaatattCA | 24.7 |
| 1730 | 1730_1 | ATTTTTCACCTACTAATATTC | ATTtttcacctactaataTTC | 48.5 |
| 1731 | 1731_1 | TTTTTCACCTACTAATATTC | TTTttcacctactaataTTC | 31.5 |
| 1732 | 1732_1 | TATTTTTCACCTACTAATATT | TAtttttcacctactaaTATT | 90.2 |
| 1733 | 1733_1 | TATTTTTCACCTACTAATAT | TATttttcacctactaaTAT | 89.1 |
| 1734 | 1734_1 | TTATTTTTCACCTACTAATAT | TTAtttttcacctactaaTAT | 86.1 |
| 1735 | 1735_1 | TTATTTTTCACCTACTAATA | TTATttttcacctactaaTA | 52.9 |
| 1736 | 1736_1 | TATTTTTCACCTACTAATA | TATTtttcacctactaaTA | 54.9 |
| 1737 | 1737_1 | TTTATTTTTCACCTACTAATA | TTTAtttttcacctactaaTA | 52 |
| 1738 | 1738_1 | TTTATTTTTCACCTACTAA | TTtatttttcacctaCTAA | 51.2 |
| 1739 | 1739_1 | TTTATTTTTCACCTACTA | TTTatttttcacctaCTA | 19 |
| 1740 | 1740_1 | CTCAACTTCTACTACTAATT | CTCAacttctactactaaTT | 19.7 |
| 1741 | 1741_1 | TCTCAACTTCTACTACTAATT | TCTCaacttctactactaaTT | 25.8 |
| 1742 | 1742_1 | CTCTCAACTTCTACTACTAAT | CTCtcaacttctactactAAT | 43 |
| 1743 | 1743_1 | CTCAACTTCTACTACTAAT | CTCAacttctactactaAT | 20.1 |
| 1744 | 1744_1 | TCTCAACTTCTACTACTAAT | TCTCaacttctactactaAT | 22.8 |
| 1745 | 1745_1 | TCTCTCAACTTCTACTACTAA | TCtctcaacttctactacTAA | 58.4 |
| 1746 | 1746_1 | CTCAACTTCTACTACTAA | CTcaacttctactaCTAA | 47.3 |
| 1747 | 1747_1 | TCTCAACTTCTACTACTAA | TCtcaacttctactaCTAA | 56.3 |
| 1748 | 1748_1 | CTCAACTTCTACTACTA | CTCaacttctactaCTA | 10.7 |
| 1749 | 1749_1 | TTCTCTCAACTTCTACTACTA | TtctctcaacttctactaCTA | 79.1 |
| 1750 | 1750_1 | TCTCTCAACTTCTACTACTA | TCtctcaacttctactacTA | 61.2 |
| 1751 | 1751_1 | TCTCAACTTCTACTACTA | TCtcaacttctactaCTA | 66.8 |
| 1752 | 1752_1 | CTCTCAACTTCTACTACTA | CtctcaacttctactACTA | 61.7 |
| 1753 | 1753_1 | CTCTCAACTTCTACTACT | CTCtcaacttctactaCT | 37.9 |
| 1754 | 1754_1 | TCTCAACTTCTACTACT | TCtcaacttctacTACT | 51.1 |
| 1755 | 1755_1 | TCTCTCAACTTCTACTACT | TCtctcaacttctactACT | 44.2 |
| 1756 | 1756_1 | TTTCTCTCAACTTCTACTACT | TTtctctcaacttctactACT | 65.7 |
| 1757 | 1757_1 | TTCTCTCAACTTCTACTACT | TTCtctcaacttctactaCT | 33.5 |
| 1758 | 1758_1 | TTTCTCTCAACTTCTACTAC | TTtctctcaacttctacTAC | 67.9 |
| 1759 | 1759_1 | CTCTCAACTTCTACTAC | CTCtcaacttctacTAC | 34.1 |
| 1760 | 1760_1 | TTCTCTCAACTTCTACTAC | TtctctcaacttctaCTAC | 63.8 |
| 1761 | 1761_1 | TTTTCTCTCAACTTCTACTAC | TTTTctctcaacttctactAC | 20.6 |
| 1762 | 1762_1 | TCTCTCAACTTCTACTAC | TCtctcaacttctacTAC | 49.7 |
| 1763 | 1763_1 | TTTCTCTCAACTTCTACTA | TTtctctcaacttctaCTA | 60.2 |
| 1764 | 1764_1 | TTTTCTCTCAACTTCTACTA | TtttctctcaacttctACTA | 52.2 |
| 1765 | 1765_1 | TTTTTCTCTCAACTTCTACTA | TTTttctctcaacttctacTA | 40.2 |
| 1766 | 1766_1 | TCTCTCAACTTCTACTA | TCtctcaacttctaCTA | 47.5 |
| 1767 | 1767_1 | TTCTCTCAACTTCTACTA | TTCtctcaacttctacTA | 35.1 |
| 1768 | 1768_1 | TTTCTCTCAACTTCTACT | TTTCtctcaacttctaCT | 28.6 |
| 1769 | 1769_1 | TTTTCTCTCAACTTCTACT | TTTtctctcaacttctaCT | 44.1 |
| 1770 | 1770_1 | CTTTTTCTCTCAACTTCTACT | CtttttctctcaacttctaCT | 99.8 |
| 1771 | 1771_1 | TTTTTCTCTCAACTTCTACT | TTTttctctcaacttctaCT | 43.7 |
| 1772 | 1772_1 | CTTTTTCTCTCAACTTCTAC | CTTtttctctcaacttctAC | 36.2 |
| 1773 | 1773_1 | ACTTTTTCTCTCAACTTCTAC | ACTttttctctcaacttctAC | 35.6 |
| 1774 | 1774_1 | TTTTCTCTCAACTTCTAC | TtttctctcaacttCTAC | 38.6 |
| 1775 | 1775_1 | TTTTTCTCTCAACTTCTAC | TttttctctcaacttCTAC | 42.1 |
| 1776 | 1776_1 | CTTTTTCTCTCAACTTCTA | CTttttctctcaacttCTA | 41.2 |
| 1777 | 1777_1 | TACTTTTTCTCTCAACTTCTA | TactttttctctcaacttCTA | 69.4 |
| 1778 | 1778_1 | ACTTTTTCTCTCAACTTCTA | ActttttctctcaacttCTA | 66.2 |
| 1779 | 1779_1 | TTTTTCTCTCAACTTCTA | TttttctctcaactTCTA | 35.5 |
| 1780 | 1780_1 | TACTTTTTCTCTCAACTTCT | TActttttctctcaacttCT | 65 |
| 1781 | 1781_1 | TTACTTTTTCTCTCAACTTCT | TtactttttctctcaactTCT | 62.1 |
| 1782 | 1782_1 | TTACTTTTTCTCTCAACTTC | TTActttttctctcaactTC | 38.9 |
| 1783 | 1783_1 | TACTTTTTCTCTCAACTTC | TACtttttctctcaactTC | 34 |
| 1784 | 1784_1 | ACTTTTTCTCTCAACTTC | ActttttctctcaaCTTC | 19.7 |
| 1785 | 1785_1 | TTACTTTTTCTCTCAACTT | TTActttttctctcaaCTT | 22 |
| 1786 | 1786_1 | TACTTTTTCTCTCAACTT | TACtttttctctcaaCTT | 22.3 |
| 1787 | 1787_1 | TTACTTTTTCTCTCAACT | TTACtttttctctcaaCT | 11.6 |
| 1788 | 1788_1 | GTTACTTTTTCTCTCAACT | GTtactttttctctcAACT | 43.2 |
| 1789 | 1789_1 | GTTACTTTTTCTCTCAAC | GTtactttttctctCAAC | 29 |
| 1790 | 1790_1 | GTTACTTTTTCTCTCAA | GTtactttttctcTCAA | 5.53 |
| 1791 | 1791_1 | AGTTACTTTTTCTCTCAA | AGTtactttttctctCAA | 6.5 |
| 1792 | 1792_1 | CTTTTACATTCCCATTAACA | CTTTtacattcccattaaCA | 24.5 |
| 1793 | 1793_1 | CACTTTTACATTCCCATTAAC | CACttttacattcccattaAC | 25.3 |
| 1794 | 1794_1 | CTTTTACATTCCCATTAAC | CTtttacattcccatTAAC | 21.5 |
| 1795 | 1795_1 | ACTTTTACATTCCCATTAAC | ACttttacattcccatTAAC | 23 |
| 1796 | 1796_1 | ACTTTTACATTCCCATTAA | ACttttacattcccaTTAA | 30 |
| 1797 | 1797_1 | CTTTTACATTCCCATTAA | CTtttacattcccaTTAA | 27.4 |
| 1798 | 1798_1 | CACTTTTACATTCCCATTAA | CActtttacattcccaTTAA | 28 |
| 1798 | 1798_2 | CACTTTTACATTCCCATTAA | CACttttacattcccatTAA | 15.9 |
| 1799 | 1799_1 | TACACTTTTACATTCCCATTA | TAcacttttacattcccatTA | 52.2 |
| 1800 | 1800_1 | ACTTTTACATTCCCATTA | ACTtttacattcccaTTA | 13.1 |
| 1801 | 1801_1 | CACTTTTACATTCCCATTA | CActtttacattcccATTA | 15.7 |
| 1802 | 1802_1 | ACACTTTTACATTCCCATTA | ACacttttacattcccaTTA | 19.1 |
| 1802 | 1802_2 | ACACTTTTACATTCCCATTA | ACActtttacattcccatTA | 9.66 |
| 1803 | 1803_1 | CACTTTTACATTCCCATT | CActtttacattccCATT | 10.2 |
| 1804 | 1804_1 | TACACTTTTACATTCCCATT | TACacttttacattcccaTT | 10.3 |
| 1805 | 1805_1 | ACACTTTTACATTCCCATT | ACACttttacattcccaTT | 4.51 |
| 1805 | 1805_2 | ACACTTTTACATTCCCATT | ACacttttacattccCATT | 6.8 |
| 1806 | 1806_1 | TACACTTTTACATTCCCAT | TACacttttacattccCAT | 3.53 |
| 1806 | 1806_2 | TACACTTTTACATTCCCAT | TACActtttacattcccAT | 4.79 |
| 1807 | 1807_1 | TACACTTTTACATTCCCA | TACacttttacattccCA | 6.35 |
| 1808 | 1808_1 | GTACACTTTTACATTCCCA | GtacacttttacattcCCA | 3 |
| 1808 | 1808_2 | GTACACTTTTACATTCCCA | GTacacttttacattccCA | 16.3 |
| 1809 | 1809_1 | GTACACTTTTACATTCCC | GTAcacttttacattcCC | 4.33 |
| 1810 | 1810_1 | TACACTTTTACATTCCC | TACacttttacattcCC | 3.26 |
| 1811 | 1811_1 | TGTACACTTTTACATTCCC | TGtacacttttacattcCC | 12.3 |
| 1809 | 1809_2 | GTACACTTTTACATTCCC | GtacacttttacattCCC | 2.49 |
| 1812 | 1812_1 | TGTACACTTTTACATTCC | TGtacacttttacatTCC | 2.47 |
| 1813 | 1813_1 | CTGTACACTTTTACATTC | CTGtacacttttacaTTC | 1.89 |
| 1814 | 1814_1 | ATCTTATTTACATCTTCC | ATcttatttacatcTTCC | 5.41 |
| 1815 | 1815_1 | GAATCTTATTTACATCTTC | GAatcttatttacatCTTC | 25.8 |
| 1816 | 1816_1 | GAATCTTATTTACATCTT | GAatcttatttacaTCTT | 19.1 |
| 1817 | 1817_1 | TGAATCTTATTTACATCT | TGAatcttatttacaTCT | 41.3 |
| 1818 | 1818_1 | ATTCAGCTTTTTCAATC | ATTCagctttttcaaTC | 16.8 |
| 1819 | 1819_1 | TTAATTTTCCCTTCACTCCT | TtaattttcccttcactcCT | 85.8 |
| 1820 | 1820_1 | TTAATTTTCCCTTCACTCC | TtaattttcccttcactCC | 85.8 |
| 1821 | 1821_1 | TTAATTTTCCCTTCACTC | TtaattttcccttcACTC | 51 |
| 1822 | 1822_1 | GTTAATTTTCCCTTCACTC | GttaattttcccttcACTC | 27.2 |
| 1823 | 1823_1 | CAAAATTACTTCTTTTATCAT | CAaaattacttcttttaTCAT | 86.7 |
| 1823 | 1823_2 | CAAAATTACTTCTTTTATCAT | CAaaattacTtcttttaTCAT | 51.5 |
| 1824 | 1824_1 | CCAAAATTACTTCTTTTATCA | CCAaaattacttcttttaTCA | 31.3 |
| 1824 | 1824_2 | CCAAAATTACTTCTTTTATCA | CCaaaattacttcttttATCA | 36 |
| 1825 | 1825_1 | TCCAAAATTACTTCTTTTATC | TCcaaaattacttctttTATC | 40.9 |
| 1826 | 1826_1 | TCCAAAATTACTTCTTTTAT | TCCaaaattacttctttTAT | 50.2 |
| 1827 | 1827_1 | CCAAAATTACTTCTTTTAT | CCAaaattacttctttTAT | 70 |
| 1828 | 1828_1 | TTCCAAAATTACTTCTTTTAT | TTCcaaaattacttctttTAT | 64.9 |
| 1829 | 1829_1 | TCCAAAATTACTTCTTTTA | TCCAaaattacttctttTA | 36.9 |
| 1830 | 1830_1 | TTCCAAAATTACTTCTTTTA | TTCCaaaattacttctttTA | 52.2 |
| 1831 | 1831_1 | GTTCCAAAATTACTTCTTT | GTTCcaaaattacttctTT | 54.8 |
| 1832 | 1832_1 | GTTCCAAAATTACTTCTT | GTtccaaaattactTCTT | 12.5 |
| 1833 | 1833_1 | TGTTCCAAAATTACTTCT | TGTtccaaaattactTCT | 20.1 |
| 1834 | 1834_1 | ATGTTCCAAAATTACTTC | ATGTtccaaaattactTC | 23.8 |
| 1835 | 1835_1 | CATATTTTACTCTTTTTATT | CATAttttactctttttaTT | 90.6 |
| 1836 | 1836_1 | CCATATTTTACTCTTTTTAT | CCATattttactctttttAT | 35.4 |
| 1836 | 1836_2 | CCATATTTTACTCTTTTTAT | CCAtattttactcttaTAT | 60.8 |
| 1837 | 1837_1 | CCCATATTTTACTCTTTTTAT | CccatattttactctttTTAT | 75.8 |
| 1838 | 1838_1 | CATATTTTACTCTTTTTAT | CATattttactcttttTAT | 83.2 |
| 1839 | 1839_1 | CCCATATTTTACTCTTTTTA | CCcatattttactcttttTA | 81.1 |
| 1840 | 1840_1 | CCATATTTTACTCTTTTTA | CCatattttactcttTTTA | 24.7 |
| 1841 | 1841_1 | ACCCATATTTTACTCTTTTTA | AcccatattttactcttTTTA | 59 |
| 1842 | 1842_1 | CCATATTTTACTCTTTTT | CCATattttactctttTT | 21.6 |
| 1843 | 1843_1 | CCCATATTTTACTCTTTTT | CCcatattttactcttTTT | 77.2 |
| 1844 | 1844_1 | ACCCATATTTTACTCTTTTT | ACccatattttactctTTTT | 97.4 |
| 1845 | 1845_1 | TACCCATATTTTACTCTTTTT | TAcccatattttactcttTTT | 58.6 |
| 1846 | 1846_1 | TACCCATATTTTACTCTTTT | TACccatattttactctTTT | 20.4 |
| 1847 | 1847_1 | CCCATATTTTACTCTTTT | CCCatattttactcttTT | 93.2 |
| 1848 | 1848_1 | ACCCATATTTTACTCTTTT | ACCcatattttactcttTT | 21.8 |
| 1846 | 1846_2 | TACCCATATTTTACTCTTTT | TAcccatattttactcTTTT | 22.5 |
| 1849 | 1849_1 | TTACCCATATTTTACTCTTTT | TTAcccatattttactcttTT | 41.4 |
| 1850 | 1850_1 | TACCCATATTTTACTCTTT | TAcccatattttactCTTT | 18.9 |
| 1851 | 1851_1 | ACCCATATTTTACTCTTT | ACCcatattttactcTTT | 13.4 |
| 1852 | 1852_1 | TTACCCATATTTTACTCTTT | TTacccatattttactCTTT | 14.5 |
| 1853 | 1853_1 | TTTACCCATATTTTACTCTTT | TTTacccatattttactcTTT | 22.2 |
| 1852 | 1852_2 | TTACCCATATTTTACTCTTT | TTACccatattttactctTT | 16.7 |
| 1853 | 1853_2 | TTTACCCATATTTTACTCTTT | TTTAcccataactctTT | 16 |
| 1854 | 1854_1 | TTACCCATATTTTACTCTT | TTAcccatattttactCTT | 14 |
| 1855 | 1855_1 | TTTACCCATATTTTACTCTT | TTtacccatattttacTCTT | 14.9 |
| 1856 | 1856_1 | ACCCATATTTTACTCTT | ACCcatattttactCTT | 8.02 |
| 1857 | 1857_1 | TACCCATATTTTACTCTT | TACccatattttactCTT | 16.7 |
| 1858 | 1858_1 | TACCCATATTTTACTCT | TACccatattttacTCT | 22.3 |
| 1859 | 1859_1 | TTACCCATATTTTACTCT | TTACccatattttactCT | 15.2 |
| 1860 | 1860_1 | TTTACCCATATTTTACTCT | TTTAcccatattttactCT | 11.8 |
| 1861 | 1861_1 | TTACCCATATTTTACTC | TTAcccatattttaCTC | 24.4 |
| 1862 | 1862_1 | TTTACCCATATTTTACTC | TTTacccatattttaCTC | 14 |
| 1863 | 1863_1 | GTTTACCCATATTTTACTC | GTttacccatattttaCTC | 12.2 |
| 1864 | 1864_1 | GTTTACCCATATTTTACT | GTttacccatatttTACT | 24.9 |
| 1865 | 1865_1 | TGTTTACCCATATTTTAC | TGTttacccatatttTAC | 13.1 |
| 1866 | 1866_1 | GTTTACCCATATTTTAC | GTttacccatattTTAC | 13.2 |
| 1867 | 1867_1 | TGTTTACCCATATTTTA | TGTttacccatattTTA | 6.69 |
| 1868 | 1868_1 | TTCTTGCTTCAACCATC | TtcttgcttcaacCATC | 13.6 |
| 1869 | 1869_1 | GTTACCTCCCTTTATAT | GTtacctccctttatAT | 60.9 |
| 1870 | 1870_1 | GGTTACCTCCCTTTAT | GgttacctccctTTAT | 39 |
| 1871 | 1871_1 | AGGTTACCTCCCTTTA | AggttacctcccTTTA | 35.4 |
| 1872 | 1872_1 | ATGTTCTCTATCTCTATA | ATGttctctatctctATA | 53.3 |
| 1873 | 1873_1 | TATGTTCTCTATCTCTA | TAtgttctctatctCTA | 73.4 |
| 1874 | 1874_1 | AGATCAAACTAAAACCT | AGAtcaaactaaaaCCT | 88.7 |
| 1875 | 1875_1 | TGCCCAATTTCACCCAA | TGcccaatttcacccAA | 30.3 |
| 1876 | 1876_1 | TTTGCCCAATTTCACCC | TttgcccaatttcacCC | 53.3 |
| 1877 | 1877_1 | TTTTGCCCAATTTCACC | TTttgcccaatttcaCC | 57.8 |
| 1878 | 1878_1 | TGTATATCAACAATTCAT | TGTatatcaacaattCAT | 20.8 |
| 1879 | 1879_1 | ACATTTCTTTAAAATTTCCA | ACatttctttaaaattTCCA | 96.4 |
| 1879 | 1879_2 | ACATTTCTTTAAAATTTCCA | ACAtttctttaaaatttCCA | 96.6 |
| 1880 | 1880_1 | CACATTTCTTTAAAATTTCCA | CACAtttctttaaaatttcCA | 95.5 |
| 1879 | 1879_3 | ACATTTCTTTAAAATTTCCA | AcatttctttaaaattTCCA | 98.1 |
| 1879 | 1879_4 | ACATTTCTTTAAAATTTCCA | ACATttctttaaaatttcCA | 98 |
| 1881 | 1881_1 | CCACATTTCTTTAAAATTTCC | CcacatttctttaaaatTTCC | 90 |
| 1882 | 1882_1 | CACATTTCTTTAAAATTTCC | CAcatttctttaaaattTCC | 94.8 |
| 1882 | 1882_2 | CACATTTCTTTAAAATTTCC | CAcatttctttaaaatTTCC | 89.1 |
| 1882 | 1882_3 | CACATTTCTTTAAAATTTCC | CACAtttctttaaaatttCC | 94.4 |
| 1883 | 1883_1 | ACATTTCTTTAAAATTTCC | ACAtttctttaaaattTCC | 91.9 |
| 1882 | 1882_4 | CACATTTCTTTAAAATTTCC | CACatttctttaaaattTCC | 92.4 |
| 1884 | 1884_1 | CCACATTTCTTTAAAATTTC | CCACatttctttaaaattTC | 98.3 |
| 1885 | 1885_1 | ACCACATTTCTTTAAAATTTC | ACCAcatttctttaaaattTC | 97.5 |
| 1884 | 1884_2 | CCACATTTCTTTAAAATTTC | CCAcatttctttaaaattTC | 102 |
| 1884 | 1884_3 | CCACATTTCTTTAAAATTTC | CCacatttctttaaaaTTTC | 94.9 |
| 1884 | 1884_4 | CCACATTTCTTTAAAATTTC | CCAcatttctttaaaatTTC | 87.2 |
| 1886 | 1886_1 | ACCACATTTCTTTAAAATTT | ACCAcatttctttaaaatTT | 94.8 |
| 1887 | 1887_1 | ACAAAACCACATTTCTTTAA | ACAaaaccacatttcttTAA | 97.4 |
| 1888 | 1888_1 | CTGTTTTCAAATCATTTC | CTGTtttcaaatcattTC | 15.8 |
| 1889 | 1889_1 | GAACCATTACTATTATCAA | GAaccattactattaTCAA | 27.3 |
| 1890 | 1890_1 | AGAACCATTACTATTATCA | AGAaccattactattaTCA | 19.8 |
| 1891 | 1891_1 | AGAACCATTACTATTATC | AGaaccattactatTATC | 17.9 |
| 1892 | 1892_1 | CTAGAACCATTACTATTA | CTAGaaccattactatTA | 35.3 |
| 1893 | 1893_1 | TAGAACCATTACTATTA | TAGAaccattactatTA | 13.2 |
| 1894 | 1894_1 | CTAGAACCATTACTATT | CTAGaaccattactaTT | 32.1 |
| 1895 | 1895_1 | AGATTACCATCTTTCAAAA | AGATtaccatctttcaaAA | 59.5 |
| 1895 | 1895_2 | AGATTACCATCTTTCAAAA | AGAttaccatctttcaAAA | 54.1 |
| 1896 | 1896_1 | AGATTACCATCTTTCAAA | AGATtaccatctttcaAA | 50.6 |
| 1896 | 1896_2 | AGATTACCATCTTTCAAA | AGattaccatattCAAA | 42.3 |
| 1897 | 1897_1 | AGATTACCATCTTTCAA | AGAttaccatctttCAA | 32.4 |
| 1898 | 1898_1 | AAGATTACCATCTTTCA | AAGAttaccatattCA | 47.9 |
| 1899 | 1899_1 | CATGCTCACACATTTTAA | CATgctcacacatttTAA | 60.5 |
| 1899 | 1899_2 | CATGCTCACACATTTTAA | CAtgctcacacattTTAA | 70.3 |
| 1899 | 1899_3 | CATGCTCACACATTTTAA | CAtgctcacacatttTAA | 69.8 |
| 1899 | 1899_4 | CATGCTCACACATTTTAA | CATGctcacacattttAA | 55.9 |
| 1900 | 1900_1 | CTTAAGCTATCTAAACA | CTTAagctatctaaaCA | 82.6 |
| 1901 | 1901_1 | TGAACAATTCAACATTCA | TGAacaattcaacatTCA | 67.7 |
| 1902 | 1902_1 | GATCAAAAAACTTTCCCT | GAtcaaaaaactttCCCT | 76.1 |
| 1903 | 1903_1 | AGATCAAAAAACTTTCCCT | AGatcaaaaaactttCCCT | 70.4 |
| 1904 | 1904_1 | AGATCAAAAAACTTTCCC | AGAtcaaaaaactaCCC | 73.6 |
| 1905 | 1905_1 | TCCTAGATCAAAAAACT | TCCTagatcaaaaaaCT | 69.9 |
| 1906 | 1906_1 | ATTTTTTCTTCTCTTTTCA | ATTTtttcttctcttttCA | 8.98 |
| 1907 | 1907_1 | TATTTTTTCTTCTCTTTTCA | TATtttttcttctcttttCA | 63.8 |
| 1908 | 1908_1 | ATATTTTTTCTTCTCTTTTC | ATattttttcttctctTTTC | 16.1 |
| 1909 | 1909_1 | TCTGCTTTAAAAACTCTC | TCtgctttaaaaacTCTC | 34.3 |
| 1910 | 1910_1 | CTCTGCTTTAAAAACTC | CTCtgctttaaaaaCTC | 51.6 |
| 1911 | 1911_1 | ACTACACAAACACATTCAA | ACtacacaaacacatTCAA | 37.6 |
| 1912 | 1912_1 | CAAACTACACAAACACATTC | CAaactacacaaacacaTTC | 41.2 |
| | | A | A | |
| 1913 | 1913_1 | ACAAACTACACAAACACATT | ACAaactacacaaacacaTT | 63.1 |
| | | C | C | |
| 1914 | 1914_1 | CAACAAACTACACAAACACA | CAAcaaactacacaaacaCA | 86.1 |
| | | T | T | |
| 1915 | 1915_1 | CACAACAAACTACACAAACA | CACaacaaactacacaaaCA | 62.1 |
| | | C | C | |
| 1916 | 1916_1 | TCACAACAAACTACACAAAC | TCACaacaaactacacaaaC | 48.6 |
| | | A | A | |
| 1917 | 1917_1 | TTCACAACAAACTACACAAA | TTCAcaacaaactacacaaA | 58.8 |
| | | C | C | |
| 1918 | 1918_1 | ATTTCACAACAAACTACACA | ATTtcacaacaaactacaCA | 76.8 |
| | | A | A | |
| 1919 | 1919_1 | CAATTTCACAACAAACTACA | CAAtttcacaacaaactaCAC | 70.7 |
| | | C | | |
| 1920 | 1920_1 | TGTAACAATTTCACAACAA | TGTaacaatttcacaaCAA | 59.5 |
| 1921 | 1921_1 | TGTAACAATTTCACAACA | TGTAacaatttcacaaCA | 28.7 |
| 1922 | 1922_1 | TTAAGCCAACCCCACCA | TtaagccaaccccacCA | 83.1 |
| 1923 | 1923_1 | TTTAAGCCAACCCCACC | TttaagccaaccccACC | 69.2 |
| 1924 | 1924_1 | ATTTAAGCCAACCCCAC | AtttaagccaaccCCAC | 60.6 |
| 1925 | 1925_1 | CCAGTAATACAAATTATA | CCAGtaatacaaattaTA | 69.5 |
| 1926 | 1926_1 | CCCAGTAATACAAATTA | CCCAgtaatacaaatTA | 55.9 |
| 1927 | 1927_1 | TCCCAGTAATACAAATT | TCCCagtaatacaaaTT | 64.9 |
| 1928 | 1928_1 | ATCCCAGTAATACAAAT | ATCCcagtaatacaaAT | 65.9 |
| 1929 | 1929_1 | CTACTAGCATCACCACT | CtactagcatcacCACT | 19.8 |
| 1930 | 1930_1 | TTCTACTAGCATCACC | TtctactagcatCACC | 21.8 |
| 1931 | 1931_1 | CTTCTACTAGCATCAC | CTtctactagcaTCAC | 33.2 |
| 1932 | 1932_1 | TAAATTACTCATTAAATCCAT | TAaattactcattaaatCCAT | 77.8 |
| 1933 | 1933_1 | ATAAATTACTCATTAAATCCA | ATaaattactcattaaaTCCA | 52.4 |
| 1934 | 1934_1 | TAAATTACTCATTAAATCCA | TAaattactcattaaaTCCA | 51.6 |
| 1935 | 1935_1 | CATAAATTACTCATTAAATCC | CATaaattactcattaaaTCC | 58.5 |
| 1935 | 1935_2 | CATAAATTACTCATTAAATCC | CATaaattacTcattaaaTCC | 22.3 |
| 1936 | 1936_1 | GATTTATTTTTCTACTTA | GAtttatttttctaCTTA | 66 |
| 1937 | 1937_1 | ATACAACAAACAATTCACTTT | ATacaacaaacaattcaCTTT | 53.2 |
| 1937 | 1937_2 | ATACAACAAACAATTCACTTT | ATACaacaaacaattcactTT | 48.1 |
| 1938 | 1938_1 | CGATACAACAAACAATTCA | CGATacaacaaacaattCA | 23 |
| 1939 | 1939_1 | GAACATCCACACTAACAACA | GAACatccacactaacaaCA | 43.6 |
| 1940 | 1940_1 | ACATCCACACTAACAACA | ACAtccacactaacaACA | 65 |
| 1939 | 1939_2 | GAACATCCACACTAACAACA | GAAcatccacactaacaACA | 52 |
| 1939 | 1939_3 | GAACATCCACACTAACAACA | GAacatccacactaacAACA | 58.1 |
| 1941 | 1941_1 | GAACATCCACACTAACAAC | GAACatccacactaacaAC | 51.3 |
| 1941 | 1941_2 | GAACATCCACACTAACAAC | GAacatccacactaaCAAC | 63.3 |
| 1942 | 1942_1 | TGAACATCCACACTAACAA | TGAacatccacactaaCAA | 57.8 |
| 1943 | 1943_1 | TTGAACATCCACACTAACA | TTGAacatccacactaaCA | 60.3 |
| 1944 | 1944_1 | TGAACATCCACACTAACA | TGAAcatccacactaaCA | 42.6 |
| 1945 | 1945_1 | CATTGAACATCCACACTA | CATtgaacatccacaCTA | 59.4 |
| 1946 | 1946_1 | ATTGAACATCCACACTA | ATTgaacatccacaCTA | 50 |
| 1947 | 1947_1 | CATTGAACATCCACACT | CAttgaacatccaCACT | 43 |
| 1948 | 1948_1 | ACTCATTGAACATCCAC | ACtcattgaacatCCAC | 46.8 |
| 1949 | 1949_1 | TATCTTTATTTAATAATCTT | TATCtttatttaataatcTT | 93.4 |
| 1949 | 1949_2 | TATCTTTATTTAATAATCTT | TAtctttatttaataaTCTT | 96.9 |
| 1950 | 1950_1 | TCTCAAGCTTCACTCTA | TCtcaagcttcactcTA | 78.6 |
| 1951 | 1951_1 | GACAATATATTCCTCAATC | GACAatatattcctcaaTC | 73 |
| 1952 | 1952_1 | GACAATATATTCCTCAAT | GACAatatattcctcaAT | 82 |
| 1952 | 1952_2 | GACAATATATTCCTCAAT | GAcaatatattcctCAAT | 76.8 |
| 1953 | 1953_1 | TCCTGTAACAATTATAC | TCCtgtaacaattaTAC | 95.4 |
| 1954 | 1954_1 | ACCCAGAATAAAAACCAC | ACccagaataaaaaCCAC | 95.5 |
| 1955 | 1955_1 | TTCCACTTTCTTACTCCC | TtccactttcttactcCC | 96.6 |
| 1956 | 1956_1 | TTCCACTTTCTTACTCC | TtccactttcttacTCC | 86.3 |
| 1957 | 1957_1 | TTTCCACTTTCTTACTCC | TttccactttcttacTCC | 89.2 |
| 1958 | 1958_1 | TTTCCACTTTCTTACTC | TTTCcactttcttacTC | 89.2 |
| 1959 | 1959_1 | ATCCCTTTACCACTTTT | ATCcctttaccactTTT | 101 |
| 1960 | 1960_1 | CATCCCTTTACCACTTTT | CAtccctttaccactTTT | 98 |
| 1961 | 1961_1 | TCATCCCTTTACCACTTT | TCatccctttaccactTT | 101 |
| 1962 | 1962_1 | TCATCCCTTTACCACTT | TCAtccctttaccacTT | 96.9 |
| 1963 | 1963_1 | CTCATCCCTTTACCACTT | CtcatccctttaccacTT | 97.7 |
| 1964 | 1964_1 | GTCTACATCTAACCCC | GtctacatctaacCCC | 97 |
| 1965 | 1965_1 | AGTCTACATCTAACCCC | AGtctacatctaaccCC | 99.6 |
| 1966 | 1966_1 | CAGTCTACATCTAACCCC | CagtctacatctaaccCC | 97.4 |
| 1967 | 1967_1 | CAGTCTACATCTAACCC | CagtctacatctaaCCC | 99.5 |
| 1968 | 1968_1 | TCAGTCTACATCTAACCC | TCagtctacatctaacCC | 98.9 |
| 1969 | 1969_1 | AGTCTACATCTAACCC | AGTctacatctaacCC | 98.2 |
| 1970 | 1970_1 | TCAGTCTACATCTAACC | TCagtctacatctAACC | 98.3 |
| 1971 | 1971_1 | TTCAGTCTACATCTAACC | TTCagtctacatctaaCC | 98 |
| 1972 | 1972_1 | TTCAGTCTACATCTAAC | TTCAgtctacatctaAC | 98.7 |
| 1973 | 1973_1 | TTTCAGTCTACATCTAA | TTtcagtctacatCTAA | 90.1 |
| 1974 | 1974_1 | AGTTTTAACCACACCTCCT | AgttttaaccacacctcCT | 102 |
| 1975 | 1975_1 | GTTTTAACCACACCTCC | GTTttaaccacacctCC | 93.7 |
| 1976 | 1976_1 | AGTTTTAACCACACCTCC | AgttttaaccacaccTCC | 95 |
| 1977 | 1977_1 | AGTTTTAACCACACCTC | AGttttaaccacacCTC | 88.7 |
| 1978 | 1978_1 | GAGTTTTAACCACACC | GAGttttaaccacACC | 94.7 |
| 1979 | 1979_1 | CAGATCTTCTCTTTATTT | CAGatcttctctttaTTT | 96.3 |
| 1980 | 1980_1 | TGTTTTCAACAAAACATCA | TGTtttcaacaaaacaTCA | 89.9 |
| 1981 | 1981_1 | TGTTTTCAACAAAACATC | TGttacaacaaaaCATC | 97.5 |
| 1982 | 1982_1 | CTGTTTTCAACAAAACAT | CTGttttcaacaaaaCAT | 102 |
| 1983 | 1983_1 | TCTGTTTTCAACAAAACA | TCTGttacaacaaaaCA | 98 |
| 1984 | 1984_1 | ATCTTTCTAAAACTTACC | ATCTttctaaaacttaCC | 96.3 |
| 1985 | 1985_1 | CAGAATCTTTCTAAAACT | CAGAatctttctaaaaCT | 91.7 |
| 1986 | 1986_1 | CTACAGAATCTTTCTAA | CTacagaatctttCTAA | 97.6 |
| 1986 | 1986_2 | CTACAGAATCTTTCTAA | CTAcagaatctttcTAA | 95.6 |
| 1987 | 1987_1 | ATTTCCCTTTATTTCCCTT | AtttccctttatttccCTT | 92 |
| 1988 | 1988_1 | GTATTTCCCTTTATTTCC | GtatttccctttattTCC | 99.5 |

In the oligonucleotide compound column, capital letters represent beta-D-oxy LNA nucleosides, LNA cytosines are 5-methyl cytosine, lower case letters are DNA nucleosides, and all internucleoside linkages are phosphorothioate. ^{m}c represent 5-methyl cytosine DNA nucleosides (used in compounds 1490_1 and 14911).

### Example 4

### Materials and Methods:

[0432] The screening assay described in Example 2 was performed using a series of further oligonucleotide targeting human ATXN3 pre-mRNA using the qpCR: (ATXN3_exon_8-9(1) PrimeTime® XL qPCR Assay (IDT).

qPCR probe and primers set 2:
Probe:
(SEQ ID NO: 1134)
5′-/56-FAM/CTCCGCAGG/ZEN/GCT ATTCAGCT AAGT/
3IABkFQ/-3′
Primer 1:
(SEQ ID NO: 1135)
5′-AGT AAGATTTGT ACCTGATGTCTGT-3′
Primer 2:
(SEQ ID NO: 1136)
5′-CATGGAAGATGAGGAAGCAGAT-3′

### Results:

TABLE 6

| | | | | % of |
|---|---|---|---|---|
| | | | | ATXN3 |
| | | Oligonucleotide Base | Oligonucleotide | mRNA |
| SEQID | CMPID | Sequence | compound | remaining |
| 1110 | 1110_2 | ACATCATTTATCACTACCAC | ACatcatttatcactacCAC | 44 |
| 1102 | 1102_2 | TATCTCAAACTATCCCCA | TatctcaaactatccCCA | 74 |
| 1104 | 1104_2 | TCCCCTAAATAATTTAATCA | TCCcctaaataatttaaTCA | 78 |
| 1116 | 1116_2 | TCTTCATTATACCATCAAAT | TCTTcattataccatcaaAT | 12 |
| 1121 | 1121_2 | CTCTCAACTTCTACTACTAA | CtctcaacttctactaCTAA | 68 |
| 1114 | 1114_2 | TGATTCTTATACTTACTA | TGATtcttatacttacTA | 64 |
| 1120 | 1120_2 | CATCACAAAATAACCTATCA | CATCacaaaataacctatCA | 38 |
| 1100 | 1100_2 | CCCCATTCAAATATTTATT | CCCcattcaaatatttATT | 79 |
| 1112 | 1112_2 | TCAGATCCTAAAATCACT | TCAGatcctaaaatcaCT | 65 |
| 1123 | 1123_2 | CCAAAATTACTTCTTTTATC | CCaaaattacttctttTATC | 37 |
| 1117 | 1117_2 | GTTTCATATTTTTAATCC | GTttcatatttttaATCC | 10 |
| 1099 | 1099_2 | CCAAAAGAAACCAAACCC | CCaaaagaaaccaaACCC | 88 |
| 1109 | 1109_2 | TGAAACCATTACTACAACC | TGAaaccattactacaACC | 22 |
| 1113 | 1113_2 | CTATACCTAAAACAATCTA | CTatacctaaaacaaTCTA | 86 |
| 1119 | 1119_2 | CAAATATTCACAAATCCTA | CaaatattcacaaatCCTA | 78 |
| 1125 | 1125_2 | ACAATATATTCCTCAATCA | ACaatatattcctcaATCA | 74 |
| 1127 | 1127_2 | CATCCCTTTACCACTTT | CatccctttaccaCTTT | 97 |
| 1118 | 1118_2 | TAATATCCTCATTACCCATT | TaatatcctcattaccCATT | 97 |
| 1103 | 1103_2 | TCTATTCCTTAACCCAAC | TCtattccttaaccCAAC | 81 |
| 1122 | 1122_2 | AATCTTATTTACATCTTCC | AATCttatttacatcttCC | 11 |
| 1126 | 1126_2 | CCTGTAACAATTATACA | CCTGtaacaattataCA | 93 |
| 1122 | 1122_3 | AATCTTATTTACATCTTCC | AatcttatttacaTCtTCC | 54 |
| 1122 | 1122_4 | AATCTTATTTACATCTTCC | AAtcTtatttacAtCttCC | 17 |
| 1122 | 1122_5 | AATCTTATTTACATCTTCC | AAtcttatttacAtCttCC | 21 |
| 1122 | 1122_6 | AATCTTATTTACATCTTCC | AatctTatttacaTCttCC | 12 |
| 1122 | 1122_7 | AATCTTATTTACATCTTCC | AatcttatttacAtCttCC | 28 |
| 1122 | 1122_8 | AATCTTATTTACATCTTCC | AAtcttatttacAtcTTCC | 28 |
| 1122 | 1122_9 | AATCTTATTTACATCTTCC | AAtcTtatttacAtctTCC | 11 |
| 1122 | 1122_10 | AATCTTATTTACATCTTCC | AatctTatttacAtctTCC | 9 |
| 1122 | 1122_11 | AATCTTATTTACATCTTCC | AatcTtatttacatcTTCC | 10 |
| 1122 | 1122_12 | AATCTTATTTACATCTTCC | AATcTtatttacAtcTtCC | 10 |
| 1122 | 1122_13 | AATCTTATTTACATCTTCC | AatCTtatttacAtcttCC | 10 |
| 1122 | 1122_14 | AATCTTATTTACATCTTCC | AatCttatttacatctTCC | 7 |
| 1122 | 1122_15 | AATCTTATTTACATCTTCC | AatcttatttacaTCttCC | 32 |
| 1122 | 1122_16 | AATCTTATTTACATCTTCC | AatCttatttacatcTTCC | 4 |
| 1122 | 1122_17 | AATCTTATTTACATCTTCC | AAtCttatttacatcTtCC | 5 |
| 1122 | 1122_18 | AATCTTATTTACATCTTCC | AaTcTtatttacaTcTtCC | 9 |
| 1122 | 1122_19 | AATCTTATTTACATCTTCC | AatcTTatttacatcTtCC | 5 |
| 1122 | 1122_20 | AATCTTATTTACATCTTCC | AatcTtatttacatCttCC | 13 |
| 1122 | 1122_21 | AATCTTATTTACATCTTCC | AAtcttatttacatCttCC | 23 |
| 1122 | 1122_22 | AATCTTATTTACATCTTCC | AatctTatttacatCttCC | 8 |
| 1122 | 1122_23 | AATCTTATTTACATCTTCC | AatcTTatttacatCttCC | 4 |
| 1122 | 1122_24 | AATCTTATTTACATCTTCC | AatctTatttacatcTTCC | 8 |
| 1122 | 1122_25 | AATCTTATTTACATCTTCC | AATcTTatttacatcTtCC | 5 |
| 1122 | 1122_26 | AATCTTATTTACATCTTCC | AAtctTatttacatcTtCC | 12 |
| 1122 | 1122_27 | AATCTTATTTACATCTTCC | AaTCTtatttacatcTtCC | 3 |
| 1122 | 1122_28 | AATCTTATTTACATCTTCC | AaTcTTatttacatcTtCC | 3 |
| 1122 | 1122_29 | AATCTTATTTACATCTTCC | AatCTTatttacatcTtCC | 3 |
| 1122 | 1122_30 | AATCTTATTTACATCTTCC | AAtcTTatttacatctTCC | 5 |
| 1122 | 1122_31 | AATCTTATTTACATCTTCC | AAtcTtatttacatctTCC | 12 |
| 1122 | 1122_32 | AATCTTATTTACATCTTCC | AAtcttatttacatctTCC | 33 |
| 1122 | 1122_33 | AATCTTATTTACATCTTCC | AatCtTatttacatctTCC | 3 |
| 1122 | 1122_34 | AATCTTATTTACATCTTCC | AatcTTatttacatctTCC | 6 |
| 1122 | 1122_35 | AATCTTATTTACATCTTCC | AatcTtatttacatctTCC | 16 |
| 1122 | 1122_36 | AATCTTATTTACATCTTCC | AATCtTatttacatcttCC | 8 |
| 1122 | 1122_37 | AATCTTATTTACATCTTCC | AAtCTTatttacatcttCC | 5 |
| 1122 | 1122_38 | AATCTTATTTACATCTTCC | AAtCttatttacatcttCC | 16 |
| 1122 | 1122_39 | AATCTTATTTACATCTTCC | AaTCTtatttacatcttCC | 7 |
| 1122 | 1122_40 | AATCTTATTTACATCTTCC | AaTCtTatttacatcttCC | 5 |
| 1122 | 1122_41 | AATCTTATTTACATCTTCC | AatCTTatttacatcttCC | 5 |
| 1122 | 1122_42 | AATCTTATTTACATCTTCC | AatCTtatttacatcttCC | 13 |
| 1122 | 1122_43 | AATCTTATTTACATCTTCC | AatcTTatttacatcttCC | 17 |
| 1109 | 1109_3 | TGAAACCATTACTACAACC | TgaaaccattacTAcaaCC | 58 |
| 1109 | 1109_4 | TGAAACCATTACTACAACC | TgaaaccattacTAcAaCC | 20 |
| 1109 | 1109_5 | TGAAACCATTACTACAACC | TgaAAccattacTacAaCC | 23 |
| 1109 | 1109_6 | TGAAACCATTACTACAACC | TgAaAccattactAcaaCC | 50 |
| 1109 | 1109_7 | TGAAACCATTACTACAACC | TgAaaCcattactAcaaCC | 46 |
| 1109 | 1109_8 | TGAAACCATTACTACAACC | TgaAAccattacTacaaCC | 48 |
| 1109 | 1109_9 | TGAAACCATTACTACAACC | TgaaaccattactaCAaCC | 25 |
| 1109 | 1109_10 | TGAAACCATTACTACAACC | TgaaAccattacTaCaACC | 24 |
| 1109 | 1109_11 | TGAAACCATTACTACAACC | TGaaAccattactaCaaCC | 36 |
| 1109 | 1109_12 | TGAAACCATTACTACAACC | TgAAAccattactaCaaCC | 20 |
| 1109 | 1109_13 | TGAAACCATTACTACAACC | TgAAaCcattactaCaaCC | 26 |
| 1109 | 1109_14 | TGAAACCATTACTACAACC | TgAaaccattactaCaaCC | 27 |
| 1109 | 1109_15 | TGAAACCATTACTACAACC | TGaAaccattacTacAaCC | 14 |
| 1109 | 1109_16 | TGAAACCATTACTACAACC | TgAaaCcattactacAACC | 12 |
| 1109 | 1109_17 | TGAAACCATTACTACAACC | TgaaaCcattacTacAaCC | 36 |
| 1109 | 1109_18 | TGAAACCATTACTACAACC | TgaaaCcattacTacaaCC | 62 |
| 1109 | 1109_19 | TGAAACCATTACTACAACC | TGaaAccattactacaaCC | 47 |
| 1109 | 1109_20 | TGAAACCATTACTACAACC | TgaAaccattactaCAaCC | 19 |
| 1109 | 1109_21 | TGAAACCATTACTACAACC | TgaAaccattactACaACC | 16 |
| 1109 | 1109_22 | TGAAACCATTACTACAACC | TgAAaccattactACaACC | 9 |
| 1109 | 1109_23 | TGAAACCATTACTACAACC | TgAaAccattactAcaACC | 29 |
| 1109 | 1109_24 | TGAAACCATTACTACAACC | TgaaaCcattactAcaACC | 41 |
| 1109 | 1109_25 | TGAAACCATTACTACAACC | TgaAACcattactAcaaCC | 34 |
| 1109 | 1109_26 | TGAAACCATTACTACAACC | TgaAaCcattactaCaaCC | 28 |
| 1109 | 1109_27 | TGAAACCATTACTACAACC | TGaAaCcattactacAACC | 10 |
| 1109 | 1109_28 | TGAAACCATTACTACAACC | TgAAaCcattactAcAACC | 52 |
| 1109 | 1109_29 | TGAAACCATTACTACAACC | TGaAAccattactacaACC | 16 |
| 1109 | 1109_30 | TGAAACCATTACTACAACC | TGAaaccattactacaaCC | 36 |
| 1109 | 1109_31 | TGAAACCATTACTACAACC | TgaaaCcattactaCaACC | 21 |
| 1109 | 1109_32 | TGAAACCATTACTACAACC | TgAAAccattactacAACC | 9 |
| 1109 | 1109_33 | TGAAACCATTACTACAACC | TgAaaCcattactacAaCC | 14 |
| 1109 | 1109_34 | TGAAACCATTACTACAACC | TGaaaccattactacaACC | 43 |
| 1109 | 1109_35 | TGAAACCATTACTACAACC | TgAAaCcattactacaACC | 15 |
| 1109 | 1109_36 | TGAAACCATTACTACAACC | TgaAACcattactacaaCC | 15 |
| 1109 | 1109_37 | TGAAACCATTACTACAACC | TGaAaCcattactacaaCC | 16 |
| 1109 | 1109_38 | TGAAACCATTACTACAACC | TGaaaCcattactacaaCC | 38 |
| 1109 | 1109_39 | TGAAACCATTACTACAACC | TgAAACcattactacaaCC | 14 |
| 1109 | 1109_40 | TGAAACCATTACTACAACC | TgAAaCcattactacaaCC | 16 |
| 1109 | 1109_41 | TGAAACCATTACTACAACC | TgaAaCcattactacaaCC | 28 |
| 1109 | 1109_42 | TGAAACCATTACTACAACC | TgaaACcattactacaaCC | 28 |
| 1122 | 1122_44 | AATCTTATTTACATCTTCC | AatcttatttacaTCTtCC | 65 |
| 1122 | 1122_45 | AATCTTATTTACATCTTCC | AatcTtatttacAtCttCC | 38 |
| 1122 | 1122_46 | AATCTTATTTACATCTTCC | AatcTtatttacaTcTTCC | 34 |
| 1122 | 1122_47 | AATCTTATTTACATCTTCC | AAtCttatttacAtcTtCC | 10 |
| 1122 | 1122_48 | AATCTTATTTACATCTTCC | AAtcTtatttacATcTtCC | 35 |
| 1122 | 1122_49 | AATCTTATTTACATCTTCC | AatCttatttacAtcTtCC | 10 |
| 1122 | 1122_50 | AATCTTATTTACATCTTCC | AAtCttatttacAtcttCC | 11 |
| 1122 | 1122_51 | AATCTTATTTACATCTTCC | AAtctTatttacatCTtCC | 9 |
| 1122 | 1122_52 | AATCTTATTTACATCTTCC | AatcTTatttacAtcTtCC | 12 |
| 1122 | 1122_53 | AATCTTATTTACATCTTCC | AatctTatttacatCTtCC | 8 |
| 1122 | 1122_54 | AATCTTATTTACATCTTCC | AaTcTtatttacatcTTCC | 4 |
| 1122 | 1122_55 | AATCTTATTTACATCTTCC | AAtcttatttacAtcTtCC | 27 |
| 1122 | 1122_56 | AATCTTATTTACATCTTCC | AAtCtTatttacAtcttCC | 5 |
| 1122 | 1122_57 | AATCTTATTTACATCTTCC | AAtcTTatttacatcttCC | 14 |
| 1122 | 1122_58 | AATCTTATTTACATCTTCC | AaTCttatttacatcttCC | 13 |
| 1122 | 1122_59 | AATCTTATTTACATCTTCC | AATcttatttacatCttCC | 6 |
| 1122 | 1122_60 | AATCTTATTTACATCTTCC | AAtcTtatttacatCttCC | 10 |
| 1122 | 1122_61 | AATCTTATTTACATCTTCC | AAtcTTatttacatcTtCC | 6 |
| 1122 | 1122_62 | AATCTTATTTACATCTTCC | AatCtTatttacatcTtCC | 3 |
| 1122 | 1122_63 | AATCTTATTTACATCTTCC | AATCttatttacaTcttCC | 5 |
| 1122 | 1122_64 | AATCTTATTTACATCTTCC | AatCttatttacatcTtCC | 7 |
| 1122 | 1122_65 | AATCTTATTTACATCTTCC | AatCttatttacatcttCC | 32 |
| 1122 | 1122_66 | AATCTTATTTACATCTTCC | AatcttatttacatcTTCC | 19 |
| 1122 | 1122_67 | AATCTTATTTACATCTTCC | AATCttatttacatcTtCC | 3 |
| 1122 | 1122_68 | AATCTTATTTACATCTTCC | AATcTtatttacatcTtCC | 4 |
| 1122 | 1122_69 | AATCTTATTTACATCTTCC | AAtCTtatttacatcTtCC | 3 |
| 1122 | 1122_70 | AATCTTATTTACATCTTCC | AAtCtTatttacatcTtCC | 3 |
| 1122 | 1122_71 | AATCTTATTTACATCTTCC | AAtcTtatttacatcTtCC | 13 |
| 1122 | 1122_72 | AATCTTATTTACATCTTCC | AaTCttatttacatcTtCC | 5 |
| 1122 | 1122_73 | AATCTTATTTACATCTTCC | AatCTtatttacatcTtCC | 5 |
| 1122 | 1122_74 | AATCTTATTTACATCTTCC | AatctTatttacatcTtCC | 10 |
| 1122 | 1122_75 | AATCTTATTTACATCTTCC | AAtCTtatttacatctTCC | 3 |
| 1122 | 1122_76 | AATCTTATTTACATCTTCC | AAtCttatttacatctTCC | 5 |
| 1122 | 1122_77 | AATCTTATTTACATCTTCC | AaTCttatttacatctTCC | 5 |
| 1122 | 1122_78 | AATCTTATTTACATCTTCC | AatCTtatttacatctTCC | 4 |
| 1122 | 1122_79 | AATCTTATTTACATCTTCC | AAtCTtatttacatcttCC | 7 |
| 1122 | 1122_80 | AATCTTATTTACATCTTCC | AAtCtTatttacatcttCC | 5 |
| 1122 | 1122_81 | AATCTTATTTACATCTTCC | AatCtTatttacatcttCC | 8 |
| 1109 | 1109_43 | TGAAACCATTACTACAACC | TgAAaccattacTAcAaCC | 18 |
| 1109 | 1109_44 | TGAAACCATTACTACAACC | TgAaAccattacTacAaCC | 27 |
| 1109 | 1109_45 | TGAAACCATTACTACAACC | TgaAaCcattacTacAaCC | 65 |
| 1109 | 1109_46 | TGAAACCATTACTACAACC | TgAaaccattacTacaACC | 25 |
| 1109 | 1109_47 | TGAAACCATTACTACAACC | TgaAaccattacTacaACC | 35 |
| 1109 | 1109_48 | TGAAACCATTACTACAACC | TgaaAccattacTacaACC | 48 |
| 1109 | 1109_49 | TGAAACCATTACTACAACC | TgaAaCcattacTacaaCC | 44 |
| 1109 | 1109_50 | TGAAACCATTACTACAACC | TgaAaccattacTaCaaCC | 34 |
| 1109 | 1109_51 | TGAAACCATTACTACAACC | TGaaaccattacTacaACC | 29 |
| 1109 | 1109_52 | TGAAACCATTACTACAACC | TgAAaccattacTacaACC | 23 |
| 1109 | 1109_53 | TGAAACCATTACTACAACC | TgaaaCcattacTaCaaCC | 39 |
| 1109 | 1109_54 | TGAAACCATTACTACAACC | TGaaaccattactaCaaCC | 33 |
| 1109 | 1109_55 | TGAAACCATTACTACAACC | TgAaAccattactaCaaCC | 29 |
| 1109 | 1109_56 | TGAAACCATTACTACAACC | TGaaAccattactacAACC | 16 |
| 1109 | 1109_57 | TGAAACCATTACTACAACC | TGaaAccattactacAaCC | 18 |
| 1109 | 1109_58 | TGAAACCATTACTACAACC | TgAaACcattactacaaCC | 12 |
| 1109 | 1109_59 | TGAAACCATTACTACAACC | TgAaaccattactaCAaCC | 13 |
| 1109 | 1109_60 | TGAAACCATTACTACAACC | TgaaAccattactACaaCC | 36 |
| 1109 | 1109_61 | TGAAACCATTACTACAACC | TGaaaccattactAcaACC | 34 |
| 1109 | 1109_62 | TGAAACCATTACTACAACC | TgAaaCcattactACaaCC | 43 |
| 1109 | 1109_63 | TGAAACCATTACTACAACC | TGaAAccattactaCaaCC | 19 |
| 1109 | 1109_64 | TGAAACCATTACTACAACC | TGaaaCcattactACaaCC | 29 |
| 1109 | 1109_65 | TGAAACCATTACTACAACC | TGaAaccattactAcaaCC | 40 |
| 1109 | 1109_66 | TGAAACCATTACTACAACC | TgaAAccattactAcAACC | 14 |
| 1109 | 1109_67 | TGAAACCATTACTACAACC | TGaAaccattactAcAaCC | 14 |
| 1109 | 1109_68 | TGAAACCATTACTACAACC | TGaaaCcattactAcAaCC | 27 |
| 1109 | 1109_69 | TGAAACCATTACTACAACC | TgAaaCcattactAcAACC | 31 |
| 1109 | 1109_70 | TGAAACCATTACTACAACC | TgAaAccattactAcAaCC | 24 |
| 1109 | 1109_71 | TGAAACCATTACTACAACC | TgaaACcattactacAACC | 10 |
| 1109 | 1109_72 | TGAAACCATTACTACAACC | TGAaaccattactacAaCC | 11 |
| 1109 | 1109_73 | TGAAACCATTACTACAACC | TgaAACcattactAcAaCC | 34 |
| 1109 | 1109_74 | TGAAACCATTACTACAACC | TGaAaCcattactacaACC | 15 |
| 1109 | 1109_75 | TGAAACCATTACTACAACC | TGaaACcattactacaaCC | 14 |
| 1109 | 1109_76 | TGAAACCATTACTACAACC | TGaAaccattactaCaaCC | 22 |
| 1109 | 1109_77 | TGAAACCATTACTACAACC | TgaAAccattactaCaaCC | 30 |
| 1109 | 1109_78 | TGAAACCATTACTACAACC | TgaaAccattactaCaaCC | 50 |
| 1109 | 1109_79 | TGAAACCATTACTACAACC | TgaAACcattactacAaCC | 9 |
| 1109 | 1109_80 | TGAAACCATTACTACAACC | TGaAaccattactacaaCC | 31 |
| 1109 | 1109_81 | TGAAACCATTACTACAACC | TgAaaCcattactacaaCC | 31 |

In the oligonucleotide compound column, capital letters represent beta-D-oxy LNA nucleosides, LNA cytosines are 5-methyl cytosine, lower case letters are DNA nucleosides, and all internucleoside linkages are phosphorothioate.

### Example 5: Testing In Vitro Efficacy of LNA Oligonucleotides in iCell® GlutaNeurons at 25 μM

### Materials and Methods:

[0434] An oligonucleotide screen was performed in a human cell line using selected LNA oligonucleotides from the previous examples.

[0435] The iCell® GlutaNeurons derived from human induced pluripotent stem cell were purchased from the vendor listed in Table 2, and were maintained as recommended by the supplier in a humidified incubator at 37° C. with 5% CO₂. For the screening assays, cells were seeded in 96 multi well plates in media recommended by the supplier (see Table 2 in the Materials and Methods section). The number of cells/well was optimized (Table 2).

[0436] Cells were grown for 7 days before addition of the oligonucleotide in concentration of 25 μM (dissolved in medium). 4 days after addition of the oligonucleotide, the cells were harvested.

[0437] RNA extraction and qPCR was performed as described for “Example 1”

[0438] Primer assays for ATXN3 and house keeping gene were:

ATXN3 primer assay (Assay ID: N/A, Item Name: Hs.PT.58.39355049):
Forward primer:
(SEQ ID NO: 1128)
GTTTCTAAAGACATGGTCACAGC
Reverse:
(SEQ ID NO: 1129)
CTATCAGGACAGAGTTCACATCC
Probe:
(SEQ ID NO: 1030)
56-FAM/AAAGGCCAG/ZEN/CCACCAGTTCAGG/3IABkFQ/
TBP primer assay (Assay ID: N/A, Item name: Hs.PT.58v.39858774
Probe:
(SEQ ID NO: 1131)
5′-/5HEX/TGA TCT TTG/ZEN/CAG TGA CCC AGC ATC A/3IABkFQ/-3′
Primer 1:
(SEQ ID NO: 1132)
5′-GCT GTT TAA CTT CGC TTC CG-3′
Primer 2:
(SEQ ID NO: 1133)
5′-CAG CAA CTT CCT CAA TTC CTT G-3′

### Results:

[0439] The relative ATXN3 mRNA expression levels were determined as % of control (medium-treated cells) i.e. the lower the value the larger the inhibition.

[0440] The compounds tested and the target knock-down data is presented in Table 7.

### Example 6: Determination of EC50 Values of LNA Gapmers Targeting ATXN3

### Materials and Methods:

[0441] Values for EC50 (concentration at which half effect on target knockdown is observed) was determined for the cell lines SK-N-AS, A431 and iPSCs (iCell® GlutaNeurons). The following oligoconcentrations were used:
[0442] SK—N-AS: 50 μM—half log dilution (3.16 fold)—8 steps including blank control
[0443] A431: 50 μM—half log dilution (3.16 fold)—8 steps including blank control
[0444] iPCS: 10 μM—10 fold dilution—8 steps including blank control

[0445] The cells were treated with oligo, lysed and analysed as indicated in previous examples.

### Results:

[0446] The compounds tested and their EC50 values is shown in table 7.

### Example 7: In Vitro Toxicity Evaluation

### Materials and Methods:

[0447] The criterion for selection of oligonucleotides assessed in the various safety assays is based on the magnitude and frequency of signals obtained. Safety assays used were: Caspase activation, hepatotoxicity, nephrotoxicity toxicity and immunotoxicity assays. The signals obtained in the individual in vitro safety assays result in a score (0-safe, 0.5 borderline toxicity, 1—mild toxicity, 2—medium toxicity and 3—severe toxicity) and are summarized into a cumulative score for each sequence (See table 7), providing an objective ranking of compounds. As reported in the references provided, the signal strength is a measure of risk for in vivo toxicity based on validation of the assays using in vivo relevant reference molecules

[0448] In vitro toxicity assays were performed as described in the following references:
[0449] Caspase activation assay: Dieckmann et al., Molecular Therapy: Nucleic Acids Vol. 10 Mar. 2018, pp 45-54.
[0450] Hepatotoxicity toxicity assay: Sewing et al., Methods in Molecular Biology Oligonucleotide-Based Therapies MIMB, volume 2036, pp 249-259 2019, Sewing et al., PLOS ONE DOI:10.1371/journal.pone.0159431 Jul. 21, 2016.
[0451] Nephrotoxicity toxicity assay: Moisan et al., Mol Ther Nucleic Acids. 2017 Mar. 17; 6:89-105. doi: 10.1016/j.omtn.2016.11.006. Epub 2016 Dec. 10.
[0452] Immunotoxicity: Sewing et al., PLoS One. 2017 Nov. 6; 12(11):e0187574. doi: 10.1371/journal.pone.0187574. eCollection 2017.

[0453] As part of the screening cascade 1170 compounds were evaluated in the cell lines SK-N-AS and A431 where compound efficacy was evaluated (Tables 4-6). Of these, 50 of the most effective compounds were evaluated for caspase activation of which 18 underwent further evaluation in the described in the three other in vitro tox assays (cumulative score is shown in Table 7).

### Results:

[0454] Conclusively, 8 compounds were identified as being highly effective and potent in vitro, and with a low or absent toxicity in the 4 in vitro assays—these compounds were therefore selected for evaluated in transgenic mice expressing human ATNX3 pre-mRNA: Compounds #18561, 1813_1, 1812_1, 1809_2, 1607_1, 1122_62, 1122_67 and 1122_33.

TABLE 7
Data obtained from examples 5, 6 & 7

| | | | | | HiPCS, Maximal |
|---|---|---|---|---|---|
| | Total | SK-N-AS | A-431 | HiPSC | efficacy at 25 μM |
| | tox | EC50 | EC50 | EC50 | (% remaining |
| CMPID | score | (μM) | (μM) | (μM) | ATXN3 transcript) |
| 1856_1 | 1.5 | 0.53 | 0.22 | 0.23 | 2.87 |
| 1806_2 | 2 | 0.35 | 0.19 | 0.03 | 0.91 |
| 1888_1 | — | 0.72 | 0.54 | — | |
| 1813_1 | 2 | 0.24 | 0.08 | 0.04 | 1.85 |
| 1640_1 | — | 1.50 | 0.19 | — | |
| 1812_1 | 1.5 | 0.20 | 0.09 | 0.09 | 0.59 |
| 1117_2 | — | 0.73 | 0.57 | — | |
| 1810_1 | — | 0.36 | 0.14 | — | |
| 1809_2 | 1.25 | 0.22 | 0.09 | 0.05 | 1.44 |
| 1489_1 | — | 1.16 | 0.30 | — | |
| 1867_1 | — | 0.54 | 0.50 | — | |
| 1893_1 | — | 0.95 | 0.34 | 0.41 | 4 |
| 1906_1 | — | 0.36 | 0.57 | 0.04 | 2.55 |
| 1214_1 | — | 1.05 | 0.38 | — | |
| 1213_1 | — | 1.01 | 0.38 | — | |
| 1423_1 | — | 0.75 | 0.23 | 0.03 | 3.58 |
| 1790_1 | — | 0.42 | 0.47 | — | |
| 1605_1 | — | 0.47 | 0.17 | — | |
| 1607_1 | 2.5 | 0.32 | 0.25 | 0.08 | 4.46 |
| 1805_1 | — | 0.75 | 0.23 | — | |
| 1806_1 | — | 0.45 | 0.20 | 0.04 | 1.3 |
| 1809_1 | 3 | 0.24 | 0.20 | 0.02 | 1.81 |
| 1808_1 | 2 | 0.26 | 0.22 | 0.06 | 1.4 |
| 1625_1 | 0.5 | 0.94 | 0.25 | 0.66 | 7.16 |
| 1122_54 | — | 0.62 | 0.15 | — | |
| 1122_16 | — | 0.30 | 0.15 | — | |
| 1122_17 | — | 0.33 | 0.17 | 0.11 | 1.07 |
| 1122_62 | 0.5 | 0.21 | 0.10 | 0.03 | 3.53 |
| 1122_19 | — | 0.28 | 0.24 | — | |
| 1122_23 | — | 0.54 | 0.18 | 0.05 | 0.59 |
| 1122_67 | 0 | 0.29 | 0.10 | 0.01 | 0.52 |
| 1122_68 | — | 0.28 | 0.13 | 0.01 | |
| 1122_69 | — | 0.27 | 0.12 | — | |
| 1122_70 | — | 0.20 | 0.10 | — | |
| 1122_27 | 1 | 0.23 | 0.12 | 0.03 | 0.55 |
| 1122_72 | 0.5 | 0.25 | 0.15 | 0.06 | 2.28 |
| 1122_28 | 1 | 0.20 | 0.12 | 0.01 | 0.37 |
| 1122_29 | — | 0.19 | 0.09 | 0.02 | 1.6 |
| 1122_73 | — | 0.29 | 0.18 | 0.04 | 1.59 |
| 1122_75 | 1 | 0.44 | 0.12 | 0.03 | 2 |
| 1122_76 | — | 0.33 | 0.19 | — | |
| 1122_77 | 1 | 0.30 | 0.20 | 0.04 | 1.97 |
| 1122_78 | — | 0.29 | 0.18 | 0.02 | 1.91 |
| 1122_33 | 1.25 | 0.18 | 0.10 | 0.02 | 1.84 |
| 1122_37 | — | 0.25 | 0.13 | 0.03 | 0.89 |
| 1122_80 | — | 0.33 | 0.17 | — | |
| 1122_41 | — | 0.24 | 0.16 | 0.01 | 0.47 |
| 1109_22 | — | 0.90 | 0.23 | 0.11 | 8.41 |
| 1109_32 | 0 | 0.75 | 0.17 | 0.09 | 3.49 |
| 1109_79 | — | 1.48 | 0.20 | — | |

### Example 8: In Vivo Transgenic Mouse Study

### Materials and Methods:

[0455] Animal Care

[0456] In vivo activity and tolerability of the compounds were tested in 10-13 week old B6;CBA-Tg(ATXN3*)84.2Cce/IbezJ male and female mice (JAX® Mice, The Jackson Laboratory) housed 3-5 per cage. The mice are transgenic mice which express the human ATXN3 pre-mRNA sequence, with 84 CAG repeats motif, an allele which is associated with MJD in humans). Animals were held in colony rooms maintained at constant temperature (22±2° C.) and humidity (40+80%) and illuminated for 12 hours per day (lights on at 0600 hours). All animals had ad libitum access to food and water throughout the studies. All procedures are performed in accordance with the respective Swiss regulations and approved by the Cantonal Ethical Committee for Animal Research.

[0457] Administration Route —Cisterna Magna Injections.

[0458] The compounds were administered to mice by intra cisterna magna (ICM) injections. Prior to ICM injection the animals received 0.05 mg/kg Buprenorphine dosed sc as analgesia. For the ICM injection animals were placed in isofluran. Intracerebroventricular injections were performed using a Hamilton micro syringe with a FEP catheter fitted with a 36 gauge needle. The skin was incised, muscles retracted and the atlanto-occipital membrane exposed. Intracerebroventricular injections were performed using a Hamilton micro syringe with a catheter fitted with a 36 gauge needle. The 4 microliter bolus of test compound or vehicle was injected over 30 seconds. Muscles were repositioned and skin closed with 2-3 sutures. Animals were placed in a varm environment until they recovered from the procedure.

[0459] Two independent experiments were performed with groups of different compounds as shown in Table 8A.

TABLE 8A

| Compound ID | Dose, μg | Time-point | Group Size |
|---|---|---|---|
| Saline only | 0 | 4 wk | 6 |
| 1856_1 | 250 | 4 wk | 8 |
| 1813_1 | 250 | 4 wk | 8 |
| 1812_1 | 250 | 4 wk | 8 |
| 1809_2 | 250 | 4 wk | 8 |
| 1607_1 | 250 | 4 wk | 8 |
| 1122_62 | 250 | 4 wk | 8 |
| 1122_67 | 250 | 4 wk | 8 |
| 1122_33 | 250 | 4 wk | 8 |

[0460] Tolerability Results:

[0461] All compounds were found to be tolerated up to the 4 weeks timepoint. Acute toxicity was measured by monitoring the animal's behavior as described in WO2016/126995 (see example 9). Sub-acute toxicity was measured by monitoring the body weight of each animal during the time course of the experiment, with >5% weight reduction indicative of sub-acute toxicity. In some groups 1 or 2 animals did show some distress after the ICM administration and were euthanized, but this was likely to be due to the procedure rather than a adverse toxicity of any of the compounds. All eight compounds were therefore considered to be well tolerated in vivo.

[0462] 4 weeks post administration, the animals were sacrificed, and tissues from the cortex, midbrain, cerebellum, hippocampus pons/medulla and striatum were collected weighed and snap frozen in liquid N2 directly after sampling. Samples were stored on dry ice until storage at −80° C.

[0463] Analysis of In Vivo Samples. Description of Tissue Preparation for Content Measurement and qPCR.

[0464] Mouse tissue samples were homogenized in the MagNA Pure LC RNA Isolation Tissue Lysis Buffer (Roche, Indianapolis, Ind.) using a Qiagen TissueLyzer II. The homogenates were incubated for 30 minutes at room temperature for complete lysis. After lysis the homogenates were centrifuged for 3 minutes at 13000 rpm and the supernatant used for analysis. Half was set aside for bioanalysis and for the other half, RNA extraction was continued directly.

[0465] Oligo Content Analysis

[0466] For bioanalysis, the samples were diluted 10-50 fold for oligo content measurements with a hybridization ELISA method. A biotinylated LNA-capture probe and a digoxigenin-conjugated LNA-detection probe (both 35 nM in 5×SSCT, each complementary to one end of the LNA oligonucleotide to be detected) was mixed with the diluted homogenates or relevant standards, incubated for 30 minutes at RT and then added to a streptavidine-coated ELISA plates (Nunc cat. no. 436014).

[0467] The plates were incubated for 1 hour at RT, washed in 2×SSCT (300 mM sodium chloride, 30 mM sodium citrate and 0,05% v/v Tween-20, pH 7.0) The captured LNA duplexes were detected using an anti-DIG antibodies conjugated with alkaline phosphatase (Roche Applied Science cat. No. 11093274910) and an alkaline phosphatase substrate system (Blue Phos substrate, KPL product code 50-88-00). The amount of oligo complexes was measured as absorbance at 615 nm on a Biotek reader.

[0468] Data was normalized to the tissue weight and expressed as nM of oligo.

[0469] mRNA Analysis

[0470] RNA was purified from 350 μL of supernatant using the MagNA Pure 96 instrument using the kit Cellular RNA Large Volume Kit (Roche, Indianapolis, Ind.). RNA samples were normalized to 2 ng/μL in RNase-Free water and stored at −20° C. until further use.

[0471] For one-step qPCR (cDNA synthesis and qPCR), each sample was run in duplicates with four probe sets (IDT, Leuven, Belgium) run in duplex.

[0472] To each reaction 4 μL of previously diluted RNA, 0.5 μL of water and 5.5 μL of TaqMan MasterMix was added. Plates were centrifuged and heat-chocked at 90° C. for 40sek followed by a short incubation on ice before analyzing the samples using qPCR (Incubation at 50° C. for 15 minutes and 90° C. for 3 minutes followed by 40 cycles at 95° C. for 5 sec and 60° C. for 45 sec). Assay probes are described below.

[0473] Data was analyzed using the relative standard curve method where each is first normalized to the housekeeping gene (RPL4) and then expressed as percent of untreated control animals.

qPCR Assays for In Vivo Studies:

Human ATXN3, qPR assay: (ATXN3_exon_8-9(1) PrimeTime ® XL qPCR Assay (IDT).
qPCR probe and primers:
Probe:
(SEQ ID NO: 1134)
5′-/56-FAM/CTCCGCAGG/ZEN/GC ATTCAGCT AAGT/3IABkFQ/-3′
Primer 1:
(SEQ ID NO: 1135)
5′-AGT AAGATTTGT ACCTGATGTCTGT-3′
Primer 2:
(SEQ ID NO: 1136)
5′-CATGGAAGATGAGGAAGCAGAT-3′

### House Keeping Gene Used:

Mouse RPL4, qPCR assay (Mm.PT.58.17609218) PrimeTime ® XL qPCR Assay (IDT).
qPCR probe and primers:
Probe:
(SEQ ID NO: 1090)
5′-/5HEX/CTG AAC AGC/ZEN/CTC CTT GGT CTT CTT GTA/3IABkFQ/-3′
Primer 1:
(SEQ ID NO: 1091)
5′-CTT GCC AGC TCT CAT TCT CTG-3′
Primer 2:
(SEQ ID NO: 1092)
5′-TGG TGG TTG AAG ATA AGG TTG A-3′

### Results:

[0475] The results are shown in Table 8B.

[0476] All compounds tested gave efficacious target inhibition in the tissues tested and were tolerated at the doses tested. Compound 1122_33 across the compounds tested has either the best or second ranked highest specific activity (lower EC50) in all tissues, followed by 1122_62 and 1122_67.

[0477] Compounds 1122_67, 1607_1, 1813_1 and 1122_33 provided high efficacy in vivo in all tissues tested, illustrating a remarkable consistent inhibition of ATXN3 expression across the brain tissues tested. Based on an accumulative rank score compound 1122_67 was consistently either the best or second ranked compound in terms of efficacy of ATXN3 knock down in the tissues tested.

### Example 9: Testing In Vitro Efficacy of LNA Oligonucleotides and Reference Compounds in a Time Course, Dose Range Experiment in Human iPSC-Derived Neurons

[0478] Materials and Methods:

[0479] Compounds used: 1122_67 and 1813_1 & the following reference compounds disclosed in WO2019/217708, as referenced by the Compound ID numbers used in WO2019/217708: 1100673, 1101657, 1102130, 1103014 & 1102987. Compounds 1100673, 1101657, 1102130 are highlighted in WO2019/217708 as providing potent in vivo inhibition, compounds 1103014 and 1102987 were not evaluated in vivo in WO2019/217708, but are included as reference compounds due to the sequence similarity to compound 1122_67 (1103014) and 1813_1 (1102987).

[0480] The iCell® GlutaNeurons cells were prepared and maintained as described in Example 5 & Table 2. Cells were grown for 7 days before addition of the oligonucleotide in concentration of 0-10 μM (dissolved in medium).

[0481] Cells were harvested at 4 days, 6 days, 9 days, 12 days and 20 days after oligo treatment, and RNA extraction and qPCR was performed as described for “Example 1”, using the ATXN3 primar assay described in example 5. The relative ATXN3 mRNA expression levels were determined as % of control (medium-treated cells) i.e. the lower the value the larger the inhibition.

### Results:

[0482] The results are shown in Table 9.

TABLE 9

| | EC50 in hiPSC-derived neurons, nM | | | | |
|---|---|---|---|---|---|
| Compound | Day 4 | Day 6 | Day 9 | Day 12 | Day 20 |
| 1122_67 | 7.2 | 1.3 | 1.4 | 1.1 | 1.1 |
| 1813_1 | 23 | 6.3 | 10 | 8.9 | 7.7 |
| 1100673 | 110 | 27 | 30 | 34 | 44 |
| 1101657 | 515 | 204 | 69 | 90 | 73 |
| 1102130 | 315 | 164 | 390 | 101 | 133 |
| 1103014 | 662 | 64 | 435 | 98 | 369 |
| 1102987 | 944 | 305 | 135 | 391 | 200 |

Compounds 1122_67 and 1813_1 were remarkably more potent than the 5 reference compounds, with compound 1122_67 being the most potent compound at all time points and both 1122_67 and 1813_1 gave a remarkably effective and long lasting inhibition of ATXN3 mRNA.

### Example 10: Comparative In Vivo Transgenic Mouse Study

### Materials and Methods:

[0483] A further in vivo study was performed at Charles River Laboratories Den Bosch B.V., Groningen, NL, using compound 1122_67 and 1813_1, and reference compound 1100673 (WO2019/217708). The study used male and female B6;CBA-Tg(ATXN3*)84.2Cce/IbezJ mice with the compounds administered via intracisternal (ICM) administration. At two timepoints after compound administration, 1 or 4 weeks, animals were euthanized and terminal plasma samples and tissues were collected.

[0484] Animal Care

[0485] In vivo activity and tolerability of the compounds were tested in 62 B6;CBA-Tg(ATXN3*)84.2Cce/IbezJ male and female mice (JAX® Mice, The Jackson Laboratory) at the age between 7-10 weeks. Following arrival, animals were housed in groups up to 5 in individually vented cages (IVC, 40×20×16 cm) in a temperature (22±2° C.) and humidity (55±15%) controlled environment on a 12 hour light cycle (07.00-19.00 h). Males and females were kept in separate cages. Standard diet (SDS Diets, RM1 PL) and domestic quality mains water were available ad libitum. If required, animals received soaked chow and/or Royal Canin in addition to Standard diet as part of pamper care. The experiments were conducted in strict accordance with the Guide for the Care and Use of Laboratory Animals (National Research Council 2011) and were in accordance with European Union directive 2010/63 and the Dutch law. The in vivo experiment described was performed at Charles River Laboratories Den Bosch B.V. location Groningen (Groningen, the Netherlands).

[0486] Administration Route—Intra-Cisterna Magna Injections.

[0487] The compounds were administered to mice by intra cisterna magna (ICM) injections. Mice were anesthetized using isoflurane (2.5-3% and 500 mL/min 02). Before surgery, Finadyne (1 mg/kg, s.c.) was administered for analgesia during surgery and the post-surgical recovery period. A mixture of bupivacaine and epinephrine was applied to the incision site and periost of the skull for local analgesia.

[0488] Animals were placed in a stereotaxic frame (Kopf instruments, USA) and an incision made at the back of the head towards the neck. Then, the skin was spread and the coordinates marked prior to drilling a hole in the occipital bone of the skull, where a cannula was placed. Next, the compounds were injected into the cisterna magna (ICM). A volume of 4 μL of the assigned test item was injected over 30 seconds. After injection, the needle and cannula were held in place for 30 seconds to ensure no back flow occurred. The cannula was then retracted, the hole was covered with skin and the incision was closed by sutures.

[0489] Animals were placed in a warm environment until recovered from the procedure.

[0490] Compound 1122_67 was administered at a single dose of 90, 150 or 250 μg, and compound 1813_1 was administered at a single dose of 150 μg or 250 μg. The reference compound 1100673 was administered at a single dose of 250 μg only.

[0491] From three days prior to ICM injections, up to one week after administration, animal's weight was registered daily. Animal's weight was monitored and registered at least twice a week for the rest of the experiment.

[0492] At the end of the experiment, on day 8 or 29 (1 or 4 weeks), the animals were euthanized by Euthasol® overdose. Terminal plasma was collected in Li-Hep tubes. Terminal tissues were harvested from the animals and were dissected on a chilled surface. Half of the tissue samples were stored in 2.0 mL Safe-Lock tubes, PCR clean, pre-weighted and precooled. Immediately after collection, samples were weighed and flash frozen in liquid N2 prior to storage at −80° C. The other half was fixed in 4% PFA for 72 hours and subsequently transferred to 70% ethanol awaiting shipment. Tissue dissection and collection was performed, collecting tissue from a range of tissues: Midbrain, Cortex, Striatum, Hippocampus, Cerebellum, Brainstem, and spinal cord (Cervical, Thoracic & Lumbar).

[0493] Tolerability Results:

[0494] Acute toxicity was measured by monitoring the animal's behavior as described in WO2016/126995 (see example 9). Chronic toxicity was measured by monitoring the body weight of each animal during the time course of the experiment, with >5% weight reduction indicative of chronic toxicity. In some groups 1 or 2 animals did show some distress after the ICM administration and were euthanized, but this was likely to be due to the nature of the surgical procedure rather than a adverse toxicity of any of the compounds.

[0495] There were signs of acute toxicity at the 250 μg dose of 1813_1 in 3 mice, leading to early euthanisation of this group of animals. Otherwise all compounds were found to be tolerated up to the 4 weeks timepoint.

[0496] After 4 weeks the animals were euthanised and brain and CNS tissue collected: Spinal cord, cortex, striatum, hippocampus, midbrain, brainstem and cerebellum as well as liver and kidney was collected in liquid nitrogen for drug concentration analysis an ATAXN3 mRNA analysis at 1 or 4 weeks following dosing.

[0497] Analysis of in vivo samples: Description of tissue preparation for content measurement and qPCR was performed as per Example 8. The EC50 was calculated, and maximum KD achieved recorded—this data is provided in Table 10.

### Results:

[0498] Compound 1122_67 was the most effective compound in all brain tissues tested and gave an excellent effective knock-down in all brain tissues tested, indicating good bio-distribution to all key tissues (1813_1 was as effective as 1122_67 in spinal cord, brainstem and midbrain). Notably compound 1122_67 gave highly effective knock-down in cerebellum, a tissue which the reference compound 1100673 was notably less effective. A further key observation at the after 4 weeks of treatment is that the efficacy of 1122_67 was even further improved as compared to the 1 week timepoint in all brain tissues. Notably, the efficacy of the reference compound, 1100673 was notably lower at the 4 week stage vs. the 1 week timepoint, particularly in key cerebellum and cortex tissues. The long duration of action and high potency of 1122_67 indicates that this compound should require a less frequent administration in a therapeutic setting.

### Example 11: Compound Stability to SVPD

### Materials and Methods:

[0499] 3′-exonuclease snake venom phosphodiesterase I (SVP) (Art. No. LS003926, Lot. No. 58H18367) was purchased by Worthington Biochemical Corp. (Lakewood, N.Y., USA). The reaction mix for the 3′-exonuclease snake venom phosphodiesterase I (SVP) assay consisted of 50 mM TRIS/HCl pH 8 buffer, 10 mM MgCl2, 30 U CIP (NEB, Ipswich, Mass., USA), 0.02 U SVP and the oligonucleotide compound. The stability of the ASOs against SVPD was determined by performing the nuclease assays over a one day time course. In each reaction mix an amount about 0.2 mg/mL ASO in a totaly volume of 150 μl was used.

[0500] The incubation period of 24 h at 37° C. was performed on an autosampler, the SVPD and reactions and the ASO stabilities were monitored in time intervals by an UHPLC system equipped with a diode-array detector and coupled with electrospray ionization-time of flight-mass spectrometry (ESI-ToF-MS). To generate the t=0 h time point, the enzyme was added into the reaction mix, directly before the first injection. Further injections took place at regular intervals over a period of 24 hours.

[0501] Compounds tested, 1122_67, 1813_1 and the reference compounds 1100673, 1101657, 1102130, 1103014, and 1102987.

### Results:

[0502] The data is illustrated in FIG. 9. Whilst the three highlighted reference compounds from WO2019/217708 and the 1122_67 and 1813_1 compounds had good stability in the SVPD assay, the 2 reference compounds from WO2019/217708 with the closest sequence to 1122_67 and 1813_1, compounds 1103014 and 1102987 were notably more vulnerable to SVPD degradation as compared to 1122_67 and 1813_1.

### Example 12: WT and polyQ Ataxin 3 Protein Levels in Human SCA3 Patient Derived Fibroblasts Treated with Selected Oligonucleotides (ASO)

### Materials and Methods:

[0503] This experiment was performed to investigate the efficacy of efficacy of knock down of the LNA oligonucleotides, 1122_67 and 1122_33, as compared to the prior art compounds, 1100673 and 1102130 in SCA3 patient derived fibroblasts, allowing for an assessment of the efficacy on the disease causing ataxin3 allele and the ataxin3 WT allele.

[0504] Cell line used for the ASO treatment, human SCA3 patient derived fibroblasts (GM06153—Coriell Institute). One hundred thousand cells were seeded per well in a 24 well plate with a total volume of 1 ml. ASOs were added immediately after to a final concentration of 10 μM (gymnotic uptake). After 4 days of incubation at, cells were washed twice with PBS, and harvested in 200 μl RIPA buffer (Thermo Scientific, Pierce).

[0505] Western blots were performed on the capillary-based immunoassay platform (WES, ProteinSimple) using a WES 12-230 kDa Wes Separation Module. Cell lysate were diluted 10× in Sample load buffer (ProteinSimple) prior loading on the cartridge. Primary antibody for Ataxin 3 (rabbit monoclonal antibody, prod. #702788 from Invitrogen) and for HPRT (rabbit monoclonal antibody, cat. #Ab109021 from Abcam). Both antibodies were used in 1/100 dilutions. Goat anti-rabbit HRP conjugate (Part. #DM-001, ProteinSimple) was used as secondary antibody.

[0506] Compass software (ProteinSimple) was for quantification of the protein bands.

### Results:

[0507] To show an efficient KD of both the wild type as well as the polyQ extended Ataxin 3 protein, GM06153 cells were treated with 10 uM of ASO for four days prior to protein analysis on the WES. Ataxin 3 antibody recognize both isoforms, and the intensity (area under peak) was normalized to the protein input based on the signal from HPRT. As seen from the FIGS. 10A and B, we observe that upon treatment with 1122_67 and 1122_33, there is an increased reduction in the polyQ extended Ataxin 3 compared to the wild type Ataxin 3. This trend is not observed for the other ASOs (Scrambled control, 1100673 or 1102130) where we observe a higher amount of the polyQ extended Ataxin 3, compared to the wild type Ataxin 3. A higher activity on the disease causing polyQ extended Ataxin 3 than the WT Ataxin 3 is preferable as it allows a selective reduction of the disease causing allele.

### Example 13: Redesign Library

### Materials and Methods:

[0508] Compound ID Nos. 1122_67 and 1122_33 were used as parents in a redesign library. The compounds in the redesign library differed from the parent compounds and each other in internucleoside linkages and/or the nucleosides used. In general, nucleosides at specific positions were varied between LNA, DNA and nucleoside analogs with different modifications in the 2′ position in the ribose. In some compounds, a MOPS or MOPO internucleoside linkages was introduced. The internucleoside linkages were otherwise phosphorothioate linkages. In some compounds, the chirality was controlled by use of phosphorothioate linkages providing for sterodefined backbones. The modifications employed are illustrated below.

[chemical structure]

[0509] The compounds of the redesign library are listed in Table 11, where the structure of each compound is described by the hierarchical editing language for macromolecules (HELM) (for details, see Zhang et al., Chem. Inf. Model. 2012, 52, 10, 2796-2806) using the following HELM annotation keys:

[LR](G) is a beta-D-oxy-LNA guanine nucleoside,
[LR](T) is a beta-D-oxy-LNA thymine nucleoside,
[LR](A) is a beta-D-oxy-LNA adenine nucleoside,
[LR]([5meC] is a beta-D-oxy-LNA 5-methyl cytosine nucleoside,
[dR](G) is a DNA guanine nucleoside,
[dR](T) is a DNA thymine nucleoside,
[dR](A) is a DNA adenine nucleoside,
[dR]([C] is a DNA cytosine nucleoside,
[sP] is a phosphorothioate internucleoside linkage (stereo undefined)
[ssP] is a stereodefined Sp phosphorothioate internucleoside linkage
[MOPS] is a 3-methoxypropylphosphonothioate internucleoside linkage
[MOPO] is a 3-methoxypropylphosphonate internucleoside linkage
[mR](G) is a 2′-O-methyl guanine nucleoside,
[mR](U) is a 2′-O-methyl uracil nucleoside,
[mR](A) is a 2′-O-methyl adenine nucleoside,
[mR](C) is a 2′-O-methyl cytosine nucleoside,
[MOE](G) is a 2′-O-methoxyethyl guanine nucleoside,
[MOE](T) is a 2′-O-methoxyethyl thymine nucleoside,
[MOE](A) is a 2′-O-methoxyethyl adenine nucleoside,
[MOE]([5meC]) is a 2′-O-methoxyethyl 5-methyl cytosine nucleoside,
[fR](G) is a 2′-fluoro guanine nucleoside,
[fR](U) is a 2′-fluoro uracil nucleoside,
[fR]R(A) is a 2′-fluoro adenine nucleoside,
[fR](C) is a 2′-fluoro cytosine nucleoside.

### Results:

[0510] In Table 11, a compound with a compound ID number “1122_” or “1816_” is a modified version of SEQ ID NO: 1122 or SEQ ID NO: 1816, respectively.

TABLE 11
Compound and HELM table

| CMPIDNO | HELM |
|---|---|
| 1122_82 | [LR](A)[sP]•[dR](A)[sP]•[dR](T)[sP]•[LR]([5meC])[sP]•[dR](T)[sP]• |
| | [LR](T)[sP]•[dR](A)[sP]•[dR](T)[sP]•[dR](T)[sP]•[dR](T)[sP]• |
| | [dR](A)[sP]•[MOE]([5meC])[sP]•[dR](A)[sP]•[dR](T)[sP]•[dR](C)[sP]• |
| | [dR](T)[sP]•[LR](T)[sP]•[LR]([5meC])[sP]•[LR]([5meC]) |
| 1122_83 | [LR](A)[sP]•[dR](A)[sP]•[dR](T)[sP]•[LR]([5meC])[sP]•[dR](T)[sP]• |
| | [LR](T)[sP]•[dR](A)[sP]•[dR](T)[sP]•[dR](T)[sP]•[dR](T)[sP]• |
| | [dR](A)[sP]•[dR](C)[sP]•[dR](A)[sP]•[dR](T)[sP]•[dR](C)[sP]• |
| | [dR](T)[sP]•[mR](U)[sP]•[LR]([5meC])[sP]•[LR]([5meC]) |
| 1122_84 | [LR](A)[sP]•[dR](A)[sP]•[dR](T)[sP]•[LR]([5meC])[sP]•[dR](T)[sP]• |
| | [LR](T)[sP]•[dR](A)[sP]•[dR](T)[sP]•[dR](T)[sP]•[dR](T)[sP]• |
| | [dR](A)[sP]•[dR](C)[sP]•[dR](A)[sP]•[dR](T)[sP]•[dR](C)[sP]• |
| | [mR](U)[sP]•[LR](T)[sP]•[LR]([5meC])[sP]•[LR]([5meC]) |
| 1122_85 | [LR](A)[sP]•[dR](A)[sP]•[dR](T)[sP]•[LR]([5meC])[sP]•[dR](T)[sP]• |
| | [LR](T)[sP]•[dR](A)[sP]•[dR](T)[sP]•[dR](T)[sP]•[dR](T)[sP]• |
| | [dR](A)[sP]•[dR](C)[sP]•[dR](A)[sP]•[mR](U)[sP]•[dR](C)[sP]• |
| | [dR](T)[sP]•[LR](T)[sP]•[LR]([5meC])[sP]•[LR]([5meC]) |
| 1122_86 | [LR](A)[sP]•[dR](A)[sP]•[dR](T)[sP]•[LR]([5meC])[sP]•[dR](T)[sP]• |
| | [mR](U)[sP]•[dR](A)[sP]•[dR](T)[sP]•[dR](T)[sP]•[dR](T)[sP]• |
| | [dR](A)[sP]•[dR](C)[sP]•[dR](A)[sP]•[dR](T)[sP]•[dR](C)[sP]• |
| | [dR](T)[sP]•[LR](T)[sP]•[LR]([5meC])[sP]•[LR]([5meC]) |
| 1122_87 | [LR](A)[sP]•[dR](A)[sP]•[dR](T)[sP]•[LR]([5meC])[sP]•[mR](U)[sP]• |
| | [LR](T)[sP]•[dR](A)[sP]•[dR](T)[sP]•[dR](T)[sP]•[dR](T)[sP]• |
| | [dR](A)[sP]•[dR](C)[sP]•[dR](A)[sP]•[dR](T)[sP]•[dR](C)[sP]• |
| | [dR](T)[sP]•[LR](T)[sP]•[LR]([5meC])[sP]•[LR]([5meC]) |
| 1122_88 | [LR](A)[sP]•[dR](A)[sP]•[mR](U)[sP]•[LR]([5meC])[sP]•[dR](T)[sP]• |
| | [LR](T)[sP]•[dR](A)[sP]•[dR](T)[sP]•[dR](T)[sP]•[dR](T)[sP]• |
| | [dR](A)[sP]•[dR](C)[sP]•[dR](A)[sP]•[dR](T)[sP]•[dR](C)[sP]• |
| | [dR](T)[sP]•[LR](T)[sP]•[LR]([5meC])[sP]•[LR]([5meC]) |
| 1122_89 | [LR](A)[sP]•[dR](A)[sP]•[dR](T)[sP]•[LR]([5meC])[sP]•[dR](T)[sP]• |
| | [LR](T)[sP]•[dR](A)[sP]•[mR](U)[sP]•[dR](T)[sP]•[dR](T)[sP]• |
| | [dR](A)[sP]•[dR](C)[sP]•[dR](A)[sP]•[dR](T)[sP]•[dR](C)[sP]• |
| | [dR](T)[sP]•[LR](T)[sP]•[LR]([5meC])[sP]•[LR]([5meC]) |
| 1122_90 | [LR](A)[sP]•[dR](A)[sP]•[dR](T)[sP]•[LR]([5meC])[sP]•[dR](T)[sP]• |
| | [LR](T)[sP]•[dR](A)[sP]•[dR](T)[sP]•[mR](U)[sP]•[dR](T)[sP]• |
| | [dR](A)[sP]•[dR](C)[sP]•[dR](A)[sP]•[dR](T)[sP]•[dR](C)[sP]• |
| | [dR](T)[sP]•[LR](T)[sP]•[LR]([5meC])[sP]•[LR]([5meC]) |
| 1122_91 | [LR](A)[sP]•[dR](A)[sP]•[dR](T)[sP]•[LR]([5meC])[sP]•[dR](T)[sP]• |
| | [LR](T)[sP]•[dR](A)[sP]•[dR](T)[sP]•[dR](T)[sP]•[mR](U)[sP]• |
| | [dR](A)[sP]•[dR](C)[sP]•[dR](A)[sP]•[dR](T)[sP]•[dR](C)[sP]• |
| | [dR](T)[sP]•[LR](T)[sP]•[LR]([5meC])[sP]•[LR]([5meC]) |
| 1122_92 | [LR](A)[sP]•[dR](A)[sP]•[dR](T)[sP]•[LR]([5meC])[sP]•[dR](T)[sP]• |
| | [LR](T)[sP]•[dR](A)[sP]•[dR](T)[sP]•[dR](T)[sP]•[dR](T)[sP]• |
| | [dR](A)[sP]•[dR](C)[sP]•[dR](A)[sP]•[dR](T)[sP]•[MOE]([5meC])[sP]• |
| | [dR](T)[sP]•[LR](T)[sP]•[LR]([5meC])[sP]•[LR]([5meC]) |
| 1122_93 | [MOE](A)[sP]•[MOE](A)[sP]•[MOE](T)[sP]•[MOE]([5meC])[sP]•[MOE](T)[sP]• |
| | [MOE](T)[sP]•[MOE](A)[sP]•[dR](T)[sP]•[dR](T)[sP]•[dR](T)[sP]• |
| | [dR](A)[sP]•[dR](C)[sP]•[dR](A)[sP]•[dR](T)[sP]•[MOE]([5meC])[sP]• |
| | [MOE](T)[sP]•[MOE](T)[sP]•[MOE]([5meC])[sP]•[MOE]([5meC]) |
| 1122_94 | [MOE](A)[sP]•[MOE](A)P•[MOE](T)P•[MOE]([5meC])P•[MOE](T)P• |
| | [MOE](T)P•[MOE](A)[sP]•[dR](T)[sP]•[dR](T)[sP]•[dR](T)[sP]• |
| | [dR](A)[sP]•[dR](C)[sP]•[dR](A)[sP]•[dR](T)[sP]•[MOE]([5meC])P• |
| | [MOE](T)P•[MOE](T)[sP]•[MOE]([5meC])[sP]•[MOE]([5meC]) |
| 1122_95 | [LR](A)[sP]•[mR](A)[sP]•[mR](U)[sP]•[LR]([5meC])[sP]•[dR](T)[sP]• |
| | [LR](T)[sP]•[dR](A)[sP]•[dR](T)[sP]•[dR](T)[sP]•[dR](T)[sP]• |
| | [dR](A)[sP]•[dR](C)[sP]•[dR](A)[sP]•[dR](T)[sP]•[dR](C)[sP]• |
| | [LR](T)[sP]•[dR](T)[sP]•[LR]([5meC])[sP]•[LR]([5meC]) |
| 1122_96 | [LR](A)[sP]•[LR](A)[sP]•[LR](T)[sP]•[LR]([5meC])[sP]•[dR](T)[sP]• |
| | [dR](T)[sP]•[dR](A)[sP]•[dR](T)[sP]•[dR](T)[sP]•[dR](T)[sP]• |
| | [dR](A)[sP]•[dR](C)[sP]•[dR](A)[sP]•[dR](T)[sP]•[LR]([5meC])[sP]• |
| | [LR](T)[sP]•[dR](T)[sP]•[LR]([5meC])[sP]•[LR]([5meC]) |
| 1122_97 | [LR](A)[sP]•[LR](A)[sP]•[LR](T)[sP]•[LR]([5meC])[sP]•[dR](T)[sP]• |
| | [dR](T)[sP]•[dR](A)[sP]•[dR](T)[sP]•[dR](T)[sP]•[dR](T)[sP]• |
| | [dR](A)[sP]•[LR]([5meC])[sP]•[dR](A)[sP]•[dR](T)[sP]•[dR](C)[sP]• |
| | [LR](T)[sP]•[dR](T)[sP]•[LR]([5meC])[sP]•[LR]([5meC]) |
| 1122_98 | [LR](A)[sP]•[LR](A)[sP]•[LR](T)[sP]•[LR]([5meC])[sP]•[dR](T)[sP]• |
| | [dR](T)[sP]•[dR](A)[sP]•[dR](T)[sP]•[dR](T)[sP]•[dR](T)[sP]• |
| | [dR](A)[sP]•[dR](C)[sP]•[dR](A)[sP]•[dR](T)[sP]•[MOE]([5meC])[sP]• |
| | [LR](T)[sP]•[dR](T)[sP]•[LR]([5meC])[sP]•[LR]([5meC]) |
| 1122_99 | [LR](A)[sP]•[LR](A)[sP]•[LR](T)[sP]•[LR]([5meC])[sP]•[dR](T)[sP]• |
| | [dR](T)[sP]•[dR](A)[sP]•[dR](T)[sP]•[dR](T)[sP]•[dR](T)[sP]• |
| | [dR](A)[sP]•[MOE]([5meC])[sP]•[dR](A)[sP]•[dR](T)[sP]•[dR](C)[sP]• |
| | [LR](T)[sP]•[dR](T)[sP]•[LR]([5meC])[sP]•[LR]([5meC]) |
| 1122_100 | [LR](A)[sP]•[LR](A)[sP]•[LR](T)[sP]•[LR]([5meC])[sP]•[dR](T)[sP]• |
| | [dR](T)[sP]•[dR](A)[sP]•[dR](T)[sP]•[dR](T)[sP]•[dR](T)[sP]• |
| | [dR](A)[sP]•[dR](C)[sP]•[dR](A)[sP]•[dR](T)[sP]•[dR](C)[sP]• |
| | [LR](T)[sP]•[mR](U)[sP]•[LR]([5meC])[sP]•[LR]([5meC]) |
| 1122_101 | [LR](A)[sP]•[LR](A)[sP]•[LR](T)[sP]•[LR]([5meC])[sP]•[dR](T)[sP]• |
| | [dR](T)[sP]•[dR](A)[sP]•[dR](T)[sP]•[dR](T)[sP]•[dR](T)[sP]• |
| | [dR](A)[sP]•[dR](C)[sP]•[dR](A)[sP]•[dR](T)[sP]•[dR](C)[sP]• |
| | [mR](U)[sP]•[dR](T)[sP]•[LR]([5meC])[sP]•[LR]([5meC]) |
| 1122_102 | [LR](A)[sP]•[LR](A)[sP]•[LR](T)[sP]•[LR]([5meC])[sP]•[dR](T)[sP]• |
| | [dR](T)[sP]•[dR](A)[sP]•[dR](T)[sP]•[dR](T)[sP]•[dR](T)[sP]• |
| | [dR](A)[sP]•[dR](C)[sP]•[dR](A)[sP]•[mR](U)[sP]•[dR](C)[sP]• |
| | [LR](T)[sP]•[dR](T)[sP]•[LR]([5meC])[sP]•[LR]([5meC]) |
| 1122_103 | [LR](A)[sP]•[LR](A)[sP]•[LR](T)[sP]•[LR]([5meC])[sP]•[dR](T)[sP]• |
| | [dR](T)[sP]•[dR](A)[sP]•[dR](T)[sP]•[dR](T)[sP]•[mR](U)[sP]• |
| | [dR](A)[sP]•[dR](C)[sP]•[dR](A)[sP]•[dR](T)[sP]•[dR](C)[sP]• |
| | [LR](T)[sP]•[dR](T)[sP]•[LR]([5meC])[sP]•[LR]([5meC]) |
| 1122_104 | [LR](A)[sP]•[LR](A)[sP]•[LR](T)[sP]•[LR]([5meC])[sP]•[dR](T)[sP]• |
| | [dR](T)[sP]•[dR](A)[sP]•[dR](T)[sP]•[mR](U)[sP]•[dR](T)[sP]• |
| | [dR](A)[sP]•[dR](C)[sP]•[dR](A)[sP]•[dR](T)[sP]•[dR](C)[sP]• |
| | [LR](T)[sP]•[dR](T)[sP]•[LR]([5meC])[sP]•[LR]([5meC]) |
| 1122_105 | [LR](A)[sP]•[LR](A)[sP]•[LR](T)[sP]•[LR]([5meC])[sP]•[dR](T)[sP]• |
| | [dR](T)[sP]•[dR](A)[sP]•[mR](U)[sP]•[dR](T)[sP]•[dR](T)[sP]• |
| | [dR](A)[sP]•[dR](C)[sP]•[dR](A)[sP]•[dR](T)[sP]•[dR](C)[sP]• |
| | [LR](T)[sP]•[dR](T)[sP]•[LR]([5meC])[sP]•[LR]([5meC]) |
| 1122_106 | [LR](A)[sP]•[LR](A)[sP]•[LR](T)[sP]•[LR]([5meC])[sP]•[mR](U)[sP]• |
| | [dR](T)[sP]•[dR](A)[sP]•[dR](T)[sP]•[dR](T)[sP]•[dR](T)[sP]• |
| | [dR](A)[sP]•[dR](C)[sP]•[dR](A)[sP]•[dR](T)[sP]•[dR](C)[sP]• |
| | [LR](T)[sP]•[dR](T)[sP]•[LR]([5meC])[sP]•[LR]([5meC]) |
| 1122_107 | [LR](A)[sP]•[LR](A)[sP]•[mR](U)[sP]•[LR]([5meC])[sP]•[dR](T)[sP]• |
| | [dR](T)[sP]•[dR](A)[sP]•[dR](T)[sP]•[dR](T)[sP]•[dR](T)[sP]• |
| | [dR](A)[sP]•[dR](C)[sP]•[dR](A)[sP]•[dR](T)[sP]•[dR](C)[sP]• |
| | [LR](T)[sP]•[dR](T)[sP]•[LR]([5meC])[sP]•[LR]([5meC]) |
| 1122_108 | [LR](A)[sP]•[mR](A)[sP]•[mR](U)[sP]•[LR]([5meC])[sP]•[dR](T)[sP]• |
| | [LR](T)[sP]•[dR](A)[sP]•[dR](T)[sP]•[dR](T)[sP]•[dR](T)[sP]• |
| | [dR](A)[sP]•[dR](C)[sP]•[dR](A)[sP]•[dR](T)[sP]•[dR](C)[sP]• |
| | [dR](T)[sP]•[LR](T)[sP]•[LR]([5meC])[sP]•[LR]([5meC]) |
| 1122_109 | [LR](A)[sP]•[LR](A)[sP]•[LR](T)[sP]•[LR]([5meC])[sP]•[dR](T)[sP]• |
| | [mR](U)[sP]•[dR](A)[sP]•[dR](T)[sP]•[dR](T)[sP]•[dR](T)[sP]• |
| | [dR](A)[sP]•[dR](C)[sP]•[dR](A)[sP]•[dR](T)[sP]•[dR](C)[sP]• |
| | [LR](T)[sP]•[dR](T)[sP]•[LR]([5meC])[sP]•[LR]([5meC]) |
| 1122_110 | [LR](A)[sP]•[LR](A)[sP]•[dR](T)[sP]•[LR]([5meC])[sP]•[dR](T)[sP]• |
| | [dR](T)[sP]•[LR](A)[sP]•[dR](T)[sP]•[dR](T)[sP]•[dR](T)[sP]• |
| | [dR](A)[sP]•[dR](C)[sP]•[dR](A)[sP]•[dR](T)[sP]•[LR]([5meC])[sP]• |
| | [LR](T)[sP]•[dR](T)[sP]•[LR]([5meC])[sP][LR]([5meC]) |
| 1122_111 | [LR](A)[sP]•[LR](A)[sP]•[dR](T)[sP]•[LR]([5meC])[sP]•[dR](T)[sP]• |
| | [dR](T)[sP]•[LR](A)[sP]•[dR](T)[sP]•[dR](T)[sP]•[dR](T)[sP]• |
| | [dR](A)[sP]•[LR]([5meC])[sP]•[dR](A)[sP]•[dR](T)[sP]•[dR](C)[sP]• |
| | [LR](T)[sP]•[dR](T)[sP]•[LR]([5meC])[sP]•[LR]([5meC]) |
| 1122_112 | [LR](A)[sP]•[LR](A)[sP]•[dR](T)[sP]•[LR]([5meC])[sP]•[dR](T)[sP]• |
| | [dR](T)[sP]•[LR](A)[sP]•[dR](T)[sP]•[dR](T)[sP]•[dR](T)[sP]• |
| | [dR](A)[sP]•[dR](C)[sP]•[dR](A)[sP]•[dR](T)[sP]•[MOE]([5meC])[sP]• |
| | [LR](T)[sP]•[dR](T)[sP]•[LR]([5meC])[sP]•[LR]([5meC]) |
| 1122_113 | [LR](A)[sP]•[LR](A)[sP]•[dR](T)[sP]•[LR]([5meC])[sP]•[dR](T)[sP]• |
| | [dR](T)[sP]•[LR](A)[sP]•[dR](T)[sP]•[dR](T)[sP]•[dR](T)[sP]• |
| | [dR](A)[sP]•[MOE]([5meC])[sP]•[dR](A)[sP]•[dR](T)[sP]•[dR](C)[sP]• |
| | [LR](T)[sP]•[dR](T)[sP]•[LR]([5meC])[sP]•[LR]([5meC]) |
| 1122_114 | [LR](A)[sP]•[LR](A)[sP]•[dR](T)[sP]•[LR]([5meC])[sP]•[dR](T)[sP]• |
| | [dR](T)[sP]•[LR](A)[sP]•[dR](T)[sP]•[dR](T)[sP]•[dR](T)[sP]• |
| | [dR](A)[sP]•[dR](C)[sP]•[dR](A)[sP]•[dR](T)[sP]•[dR](C)[sP]• |
| | [LR](T)[sP]•[mR](U)[sP]•[LR]([5meC])[sP]•[LR]([5meC]) |
| 1122_115 | [LR](A)[sP]•[LR](A)[sP]•[dR](T)[sP]•[LR]([5meC])[sP]•[dR](T)[sP]• |
| | [dR](T)[sP]•[LR](A)[sP]•[dR](T)[sP]•[dR](T)[sP]•[dR](T)[sP]• |
| | [dR](A)[sP]•[dR](C)[sP]•[dR](A)[sP]•[dR](T)[sP]•[dR](C)[sP]• |
| | [mR](U)[sP]•[dR](T)[sP]•[LR]([5meC])[sP]•[LR]([5meC]) |
| 1122_116 | [LR](A)[sP]•[LR](A)[sP]•[dR](T)[sP]•[LR]([5meC])[sP]•[dR](T)[sP]• |
| | [dR](T)[sP]•[LR](A)[sP]•[dR](T)[sP]•[dR](T)[sP]•[dR](T)[sP]• |
| | [dR](A)[sP]•[dR](C)[sP]•[dR](A)[sP]•[mR](U)[sP]•[dR](C)[sP]• |
| | [LR](T)[sP]•[dR](T)[sP]•[LR]([5meC])[sP]•[LR]([5meC]) |
| 1122_117 | [LR](A)[sP]•[LR](A)[sP]•[dR](T)[sP]•[LR]([5meC])[sP]•[dR](T)[sP]• |
| | [dR](T)[sP]•[LR](A)[sP]•[dR](T)[sP]•[dR](T)[sP]•[mR](U)[sP]• |
| | [dR](A)[sP]•[dR](C)[sP]•[dR](A)[sP]•[dR](T)[sP]•[dR](C)[sP]• |
| | [LR](T)[sP]•[dR](T)[sP]•[LR]([5meC])[sP]•[LR]([5meC]) |
| 1122_118 | [LR](A)[sP]•[LR](A)[sP]•[dR](T)[sP]•[LR]([5meC])[sP]•[dR](T)[sP]• |
| | [dR](T)[sP]•[LR](A)[sP]•[dR](T)[sP]•[mR](U)[sP]•[dR](T)[sP]• |
| | [dR](A)[sP]•[dR](C)[sP]•[dR](A)[sP]•[dR](T)[sP]•[dR](C)[sP]• |
| | [LR](T)[sP]•[dR](T)[sP]•[LR]([5meC])[sP]•[LR]([5meC]) |
| 1122_119 | [LR](A)[sP]•[LR](A)[sP]•[dR](T)[sP]•[LR]([5meC])[sP]•[dR](T)[sP]• |
| | [dR](T)[sP]•[LR](A)[sP]•[mR](U)[sP]•[dR](T)[sP]•[dR](T)[sP]• |
| | [dR](A)[sP]•[dR](C)[sP]•[dR](A)[sP]•[dR](T)[sP]•[dR](C)[sP]• |
| | [LR](T)[sP]•[dR](T)[sP]•[LR]([5meC])[sP]•[LR]([5meC]) |
| 1122_120 | [LR](A)[sP]•[LR](A)[sP]•[dR](T)[sP]•[LR]([5meC])[sP]•[dR](T)[sP]• |
| | [mR](U)[sP]•[LR](A)[sP]•[dR](T)[sP]•[dR](T)[sP]•[dR](T)[sP]• |
| | [dR](A)[sP]•[dR](C)[sP]•[dR](A)[sP]•[dR](T)[sP]•[dR](C)[sP]• |
| | [LR](T)[sP]•[dR](T)[sP]•[LR]([5meC])[sP]•[LR]([5meC]) |
| 1122_121 | [LR](A)[sP]•[LR](A)[sP]•[dR](T)[sP]•[LR]([5meC])[sP]•[mR](U)[sP]• |
| | [dR](T)[sP]•[LR](A)[sP]•[dR](T)[sP]•[dR](T)[sP]•[dR](T)[sP]• |
| | [dR](A)[sP]•[dR](C)[sP]•[dR](A)[sP]•[dR](T)[sP]•[dR](C)[sP]• |
| | [LR](T)[sP]•[dR](T)[sP]•[LR]([5meC])[sP]•[LR]([5meC]) |
| 1122_122 | [LR](A)[sP]•[LR](A)[sP]•[mR](U)[sP]•[LR]([5meC])[sP]•[dR](T)[sP]• |
| | [dR](T)[sP]•[LR](A)[sP]•[dR](T)[sP]•[dR](T)[sP]•[dR](T)[sP]• |
| | [dR](A)[sP]•[dR](C)[sP]•[dR](A)[sP]•[dR](T)[sP]•[dR](C)[sP]• |
| | [LR](T)[sP]•[dR](T)[sP]•[LR]([5meC])[sP]•[LR]([5meC]) |
| 1122_123 | [LR](A)[sP]•[dR](A)[sP]•[dR](T)[sP]•[LR]([5meC])[sP]•[dR](T)[sP]• |
| | [LR](T)[sP]•[dR](A)[sP]•[dR](T)[sP]•[dR](T)[sP]•[dR](T)[sP]• |
| | [dR](A)[sP]•[dR](C)[sP]•[dR](A)[sP]•[dR](T)[sP]•[LR]([5meC])[sP]• |
| | [dR](T)[sP]•[LR](T)[sP]•[LR]([5meC])[sP]•[LR]([5meC]) |
| 1122_124 | [LR](A)[sP]•[dR](A)[sP]•[dR](T)[sP]•[LR]([5meC])[sP]•[dR](T)[sP]• |
| | [LR](T)[sP]•[dR](A)[sP]•[dR](T)[sP]•[dR](T)[sP]•[dR](T)[sP]• |
| | [dR](A)[sP]•[LR]([5meC])[sP]•[dR](A)[sP]•[dR](T)[sP]•[dR](C)[sP]• |
| | [dR](T)[sP]•[LR](T)[sP]•[LR]([5meC])[sP]•[LR]([5meC]) |
| 1122_125 | [LR](A)[sP]•[LR](A)[sP]•[dR](T)[sP]•[LR]([5meC])[sP]•[dR](T)[sP]• |
| | [dR](T)[sP]•[LR](A)[sP]•[dR](T)[sP]•[dR](T)[sP]•[dR](T)[sP]• |
| | [dR](A)[sP]•[dR](C)[sP]•[dR](A)[sP]•[dR](T)[sP]•[dR](C)[sP]• |
| | [LR](T)[sP]•[dR](T)[sP]•[LR]([5meC])[sP]•[LR]([5meC]) |
| 1122_126 | [LR](A)[sP]•[LR](A)[sP]•[dR](T)[sP]•[LR]([5meC])[sP]•[dR](T)[sP]• |
| | [dR](T)[sP]•[LR](A)[ssP]•[dR](T)[sP]•[dR](T)[sP]•[dR](T)[sP]• |
| | [dR](A)[sP]•[dR](C)[sP]•[dR](A)[sP]•[dR](T)[sP]•[dR](C)[sP]• |
| | [LR](T)[sP]•[dR](T)[sP]•[LR]([5meC])[sP]•[LR]([5meC]) |
| 1122_127 | [LR](A)[sP]•[LR](A)[sP]•[dR](T)[sP]•[LR]([5meC])[sP]•[dR](T)[sP]• |
| | [dR](T)[sP]•[LR](A)[sP]•[dR](T)[ssP]•[dR](T)[sP]•[dR](T)[sP]• |
| | [dR](A)[sP]•[dR](C)[sP]•[dR](A)[sP]•[dR](T)[sP]•[dR](C)[sP]• |
| | [LR](T)[sP]•[dR](T)[sP]•[LR]([5meC])[sP]•[LR]([5meC]) |
| 1122_128 | [LR](A)[sP]•[LR](A)[sP]•[dR](T)[sP]•[LR]([5meC])[sP]•[dR](T)[sP]• |
| | [dR](T)[sP]•[LR](A)[sP]•[dR](T)[sP]•[dR](T)[ssP]•[dR](T)[sP]• |
| | [dR](A)[sP]•[dR](C)[sP]•[dR](A)[sP]•[dR](T)[sP]•[dR](C)[sP]• |
| | [LR](T)[sP]•[dR](T)[sP]•[LR]([5meC])[sP]•[LR]([5meC]) |
| 1122_129 | [LR](A)[sP]•[LR](A)[sP]•[dR](T)[sP]•[LR]([5meC])[sP]•[dR](T)[sP]• |
| | [dR](T)[sP]•[LR](A)[sP]•[dR](T)[sP]•[dR](T)[sP]•[dR](T)[ssP]• |
| | [dR](A)[sP]•[dR](C)[sP]•[dR](A)[sP]•[dR](T)[sP]•[dR](C)[sP]• |
| | [LR](T)[sP]•[dR](T)[sP]•[LR]([5meC])[sP]•[LR]([5meC]) |
| 1122_130 | [LR](A)[sP]•[LR](A)[sP]•[dR](T)[sP]•[LR]([5meC])[sP]•[dR](T)[sP]• |
| | [dR](T)[sP]•[LR](A)[sP]•[dR](T)[sP]•[dR](T)[sP]•[dR](T)[sP]• |
| | [dR](A)[ssP]•[dR](C)[sP]•[dR](A)[sP]•[dR](T)[sP]•[dR](C)[sP]• |
| | [LR](T)[sP]•[dR](T)[sP]•[LR]([5meC])[sP]•[LR]([5meC]) |
| 1122_131 | [LR](A)[sP]•[LR](A)[sP]•[dR](T)[sP]•[LR]([5meC])[sP]•[dR](T)[sP]• |
| | [dR](T)[sP]•[LR](A)[sP]•[dR](T)[sP]•[dR](T)[sP]•[dR](T)[sP]• |
| | [dR](A)[sP]•[dR](C)[ssP]•[dR](A)[sP]•[dR](T)[sP]•[dR](C)[sP]• |
| | [LR](T)[sP]•[dR](T)[sP]•[LR]([5meC])[sP]•[LR]([5meC]) |
| 1122_132 | [LR](A)[sP]•[LR](A)[sP]•[dR](T)[sP]•[LR]([5meC])[sP]•[dR](T)[sP]• |
| | [dR](T)[sP]•[LR](A)[sP]•[dR](T)[sP]•[dR](T)[sP]•[dR](T)[sP]• |
| | [dR](A)[sP]•[dR](C)[sP]•[dR](A)[ssP]•[dR](T)[sP]•[dR](C)[sP]• |
| | [LR](T)[sP]•[dR](T)[sP]•[LR]([5meC])[sP]•[LR]([5meC]) |
| 1122_133 | [LR](A)[sP]•[LR](A)[sP]•[dR](T)[sP]•[LR]([5meC])[sP]•[dR](T)[sP]• |
| | [dR](T)[sP]•[LR](A)[sP]•[dR](T)[sP]•[dR](T)[sP]•[dR](T)[sP]• |
| | [dR](A)[sP]•[dR](C)[sP]•[dR](A)[sP]•[dR](T)[ssP]•[dR](C)[sP]• |
| | [LR](T)[sP]•[dR](T)[sP]•[LR]([5meC])[sP]•[LR]([5meC]) |
| 1122_134 | [LR](A)[sP]•[LR](A)[sP]•[dR](T)[sP]•[LR]([5meC])[sP]•[dR](T)[sP]• |
| | [dR](T)[sP]•[LR](A)[sP]•[dR](T)[sP]•[dR](T)[sP]•[dR](T)[sP]• |
| | [dR](A)[sP]•[dR](C)[sP]•[dR](A)[sP]•[dR](T)[sP]•[dR](C)[ssP]• |
| | [LR](T)[sP]•[dR](T)[sP]•[LR]([5meC])[sP]•[LR]([5meC]) |
| 1122_135 | [LR](A)[sP]•[LR](A)[sP]•[dR](T)[sP]•[LR]([5meC])[sP]•[dR](T)[sP]• |
| | [dR](T)[sP]•[LR](A)[sP]•[dR](T)[sP]•[dR](T)[sP]•[dR](T)[sP]• |
| | [dR](A)[sP]•[dR](C)[sP]•[dR](A)[sP]•[dR](T)[sP]•[dR](C)[sP]• |
| | [LR](T)[ssP]•[dR](T)[sP]•[LR]([5meC])[sP]•[LR]([5meC]) |
| 1122_136 | [LR](A)[sP]•[LR](A)[sP]•[LR](T)[sP]•[LR]([5meC])[ssP]•[dR](T)[sP]• |
| | [dR](T)[sP]•[dR](A)[sP]•[dR](T)[sP]•[dR](T)[sP]•[dR](T)[sP]• |
| | [dR](A)[sP]•[dR](C)[sP]•[dR](A)[sP]•[dR](T)[sP]•[dR](C)[sP]• |
| | [LR](T)[sP]•[dR](T)[sP]•[LR]([5meC])[sP]•[LR]([5meC]) |
| 1122_137 | [LR](A)[sP]•[LR](A)[sP]•[LR](T)[sP]•[LR]([5meC])[sP]•[dR](T)[ssP]• |
| | [dR](T)[sP]•[dR](A)[sP]•[dR](T)[sP]•[dR](T)[sP]•[dR](T)[sP]• |
| | [dR](A)[sP]•[dR](C)[sP]•[dR](A)[sP]•[dR](T)[sP]•[dR](C)[sP]• |
| | [LR](T)[sP]•[dR](T)[sP]•[LR]([5meC])[sP]•[LR]([5meC]) |
| 1122_138 | [LR](A)[sP]•[LR](A)[sP]•[LR](T)[sP]•[LR]([5meC])[sP]•[dR](T)[sP]• |
| | [dR](T)[ssP]•[dR](A)[sP]•[dR](T)[sP]•[dR](T)[sP]•[dR](T)[sP]• |
| | [dR](A)[sP]•[dR](C)[sP]•[dR](A)[sP]•[dR](T)[sP]•[dR](C)[sP]• |
| | [LR](T)[sP]•[dR](T)[sP]•[LR]([5meC])[sP]•[LR]([5meC]) |
| 1122_139 | [LR](A)[sP]•[LR](A)[sP]•[LR](T)[sP]•[LR]([5meC])[sP]•[dR](T)[sP]• |
| | [dR](T)[sP]•[dR](A)[ssP]•[dR](T)[sP]•[dR](T)[sP]•[dR](T)[sP]• |
| | [dR](A)[sP]•[dR](C)[sP]•[dR](A)[sP]•[dR](T)[sP]•[dR](C)[sP]• |
| | [LR](T)[sP]•[dR](T)[sP]•[LR]([5meC])[sP]•[LR]([5meC]) |
| 1122_140 | [LR](A)[sP]•[LR](A)[sP]•[LR](T)[sP]•[LR]([5meC])[sP]•[dR](T)[sP]• |
| | [dR](T)[sP]•[dR](A)[sP]•[dR](T)[ssP]•[dR](T)[sP]•[dR](T)[sP]• |
| | [dR](A)[sP]•[dR](C)[sP]•[dR](A)[sP]•[dR](T)[sP]•[dR](C)[sP]• |
| | [LR](T)[sP]•[dR](T)[sP]•[LR]([5meC])[sP]•[LR]([5meC]) |
| 1122_141 | [LR](A)[sP]•[LR](A)[sP]•[LR](T)[sP]•[LR]([5meC])[sP]•[dR](T)[sP]• |
| | [dR](T)[sP]•[dR](A)[sP]•[dR](T)[sP]•[dR](T)[ssP]•[dR](T)[sP]• |
| | [dR](A)[sP]•[dR](C)[sP]•[dR](A)[sP]•[dR](T)[sP]•[dR](C)[sP]• |
| | [LR](T)[sP]•[dR](T)[sP]•[LR]([5meC])[sP]•[LR]([5meC]) |
| 1122_142 | [LR](A)[sP]•[LR](A)[sP]•[LR](T)[sP]•[LR]([5meC])[sP]•[dR](T)[sP]• |
| | [dR](T)[sP]•[dR](A)[sP]•[dR](T)[sP]•[dR](T)[sP]•[dR](T)[ssP]• |
| | [dR](A)[sP]•[dR](C)[sP]•[dR](A)[sP]•[dR](T)[sP]•[dR](C)[sP]• |
| | [LR](T)[sP]•[dR](T)[sP]•[LR]([5meC])[sP]•[LR]([5meC]) |
| 1122_143 | [LR](A)[sP]•[LR](A)[sP]•[LR](T)[sP]•[LR]([5meC])[sP]•[dR](T)[sP]• |
| | [dR](T)[sP]•[dR](A)[sP]•[dR](T)[sP]•[dR](T)[sP]•[dR](T)[sP]• |
| | [dR](A)[ssP]•[dR](C)[sP]•[dR](A)[sP]•[dR](T)[sP]•[dR](C)[sP]• |
| | [LR](T)[sP]•[dR](T)[sP]•[LR]([5meC])[sP]•[LR]([5meC]) |
| 1122_144 | [LR](A)[sP]•[LR](A)[sP]•[LR](T)[sP]•[LR]([5meC])[sP]•[dR](T)[sP]• |
| | [dR](T)[sP]•[dR](A)[sP]•[dR](T)[sP]•[dR](T)[sP]•[dR](T)[sP]• |
| | [dR](A)[sP]•[dR](C)[ssP]•[dR](A)[sP]•[dR](T)[sP]•[dR](C)[sP]• |
| | [LR](T)[sP]•[dR](T)[sP]•[LR]([5meC])[sP]•[LR]([5meC]) |
| 1122_145 | [LR](A)[sP]•[LR](A)[sP]•[LR](T)[sP]•[LR]([5meC])[sP]•[dR](T)[sP]• |
| | [dR](T)[sP]•[dR](A)[sP]•[dR](T)[sP]•[dR](T)[sP]•[dR](T)[sP]• |
| | [dR](A)[sP]•[dR](C)[sP]•[dR](A)[ssP]•[dR](T)[sP]•[dR](C)[sP]• |
| | [LR](T)[sP]•[dR](T)[sP]•[LR]([5meC])[sP]•[LR]([5meC]) |
| 1122_146 | [LR](A)[sP]•[LR](A)[sP]•[LR](T)[sP]•[LR]([5meC])[sP]•[dR](T)[sP]• |
| | [dR](T)[sP]•[dR](A)[sP]•[dR](T)[sP]•[dR](T)[sP]•[dR](T)[sP]• |
| | [dR](A)[sP]•[dR](C)[sP]•[dR](A)[sP]•[dR](T)[ssP]•[dR](C)[sP]• |
| | [LR](T)[sP]•[dR](T)[sP]•[LR]([5meC])[sP]•[LR]([5meC]) |
| 1122_147 | [LR](A)[sP]•[LR](A)[sP]•[LR](T)[sP]•[LR]([5meC])[sP]•[dR](T)[sP]• |
| | [dR](T)[sP]•[dR](A)[sP]•[dR](T)[sP]•[dR](T)[sP]•[dR](T)[sP]• |
| | [dR](A)[sP]•[dR](C)[sP]•[dR](A)[sP]•[dR](T)[sP]•[dR](C)[ssP]• |
| | [LR](T)[sP]•[dR](T)[sP]•[LR]([5meC])[sP]•[LR]([5meC]) |
| 1122_148 | [LR](A)[sP]•[LR](A)[sP]•[LR](T)[sP]•[LR]([5meC])[sP]•[dR](T)[sP]• |
| | [dR](T)[sP]•[dR](A)[sP]•[dR](T)[sP]•[dR](T)[sP]•[dR](T)[sP]• |
| | [dR](A)[sP]•[dR](C)[sP]•[dR](A)[sP]•[dR](T)[sP]•[dR](C)[sP]• |
| | [LR](T)[ssP]•[dR](T)[sP]•[LR]([5meC])[sP]•[LR]([5meC]) |
| 1122_149 | [LR](A)[sP]•[dR](A)[sP]•[dR](T)[sP]•[LR]([5meC])[sP]•[dR](T)[sP]• |
| | [LR](T)[ssP]•[dR](A)[sP]•[dR](T)[sP]•[dR](T)[sP]•[dR](T)[sP]• |
| | [dR](A)[sP]•[dR](C)[sP]•[dR](A)[sP]•[dR](T)[sP]•[dR](C)[sP]• |
| | [dR](T)[sP]•[LR](T)[sP]•[LR]([5meC])[sP]•[LR]([5meC]) |
| 1122_150 | [LR](A)[sP]•[dR](A)[sP]•[dR](T)[sP]•[LR]([5meC])[sP]•[dR](T)[sP]• |
| | [LR](T)[sP]•[dR](A)[ssP]•[dR](T)[sP]•[dR](T)[sP]•[dR](T)[sP]• |
| | [dR](A)[sP]•[dR](C)[sP]•[dR](A)[sP]•[dR](T)[sP]•[dR](C)[sP]• |
| | [dR](T)[sP]•[LR](T)[sP]•[LR]([5meC])[sP]•[LR]([5meC]) |
| 1122_151 | [LR](A)[sP]•[dR](A)[sP]•[dR](T)[sP]•[LR]([5meC])[sP]•[dR](T)[sP]• |
| | [LR](T)[sP]•[dR](A)[sP]•[dR](T)[ssP]•[dR](T)[sP]•[dR](T)[sP]• |
| | [dR](A)[sP]•[dR](C)[sP]•[dR](A)[sP]•[dR](T)[sP]•[dR](C)[sP]• |
| | [dR](T)[sP]•[LR](T)[sP]•[LR]([5meC])[sP]•[LR]([5meC]) |
| 1122_152 | [LR](A)[sP]•[dR](A)[sP]•[dR](T)[sP]•[LR]([5meC])[sP]•[dR](T)[sP]• |
| | [LR](T)[sP]•[dR](A)[sP]•[dR](T)[sP]•[dR](T)[ssP]•[dR](T)[sP]• |
| | [dR](A)[sP]•[dR](C)[sP]•[dR](A)[sP]•[dR](T)[sP]•[dR](C)[sP]• |
| | [dR](T)[sP]•[LR](T)[sP]•[LR]([5meC])[sP]•[LR]([5meC]) |
| 1122_153 | [LR](A)[sP]•[dR](A)[sP]•[dR](T)[sP]•[LR]([5meC])[sP]•[dR](T)[sP]• |
| | [LR](T)[sP]•[dR](A)[sP]•[dR](T)[sP]•[dR](T)[sP]•[dR](T)[ssP]• |
| | [dR](A)[sP]•[dR](C)[sP]•[dR](A)[sP]•[dR](T)[sP]•[dR](C)[sP]• |
| | [dR](T)[sP]•[LR](T)[sP]•[LR]([5meC])[sP]•[LR]([5meC]) |
| 1122_154 | [LR](A)[sP]•[dR](A)[sP]•[dR](T)[sP]•[LR]([5meC])[sP]•[dR](T)[sP]• |
| | [LR](T)[sP]•[dR](A)[sP]•[dR](T)[sP]•[dR](T)[sP]•[dR](T)[sP]• |
| | [dR](A)[ssP]•[dR](C)[sP]•[dR](A)[sP]•[dR](T)[sP]•[dR](C)[sP]• |
| | [dR](T)[sP]•[LR](T)[sP]•[LR]([5meC])[sP]•[LR]([5meC]) |
| 1122_155 | [LR](A)[sP]•[dR](A)[sP]•[dR](T)[sP]•[LR]([5meC])[sP]•[dR](T)[sP]• |
| | [LR](T)[sP]•[dR](A)[sP]•[dR](T)[sP]•[dR](T)[sP]•[dR](T)[sP]• |
| | [dR](A)[sP]•[dR](C)[ssP]•[dR](A)[sP]•[dR](T)[sP]•[dR](C)[sP]• |
| | [dR](T)[sP]•[LR](T)[sP]•[LR]([5meC])[sP]•[LR]([5meC]) |
| 1122_156 | [LR](A)[sP]•[dR](A)[sP]•[dR](T)[sP]•[LR]([5meC])[sP]•[dR](T)[sP]• |
| | [LR](T)[sP]•[dR](A)[sP]•[dR](T)[sP]•[dR](T)[sP]•[dR](T)[sP]• |
| | [dR](A)[sP]•[dR](C)[sP]•[dR](A)[ssP]•[dR](T)[sP]•[dR](C)[sP]• |
| | [dR](T)[sP]•[LR](T)[sP]•[LR]([5meC])[sP]•[LR]([5meC]) |
| 1122_157 | [LR](A)[sP]•[dR](A)[sP]•[dR](T)[sP]•[LR]([5meC])[sP]•[dR](T)[sP]• |
| | [LR](T)[ sP]•[dR](A)[sP]•[dR](T)[sP]•[dR](T)[sP]•[dR](T)[sP]• |
| | [dR](A)[sP]•[dR](C)[sP]•[dR](A)[sP]•[dR](T)[ssP]•[dR](C)[sP]• |
| | [dR](T)[sP]•[LR](T)[sP]•[LR]([5meC])[sP]•[LR]([5meC]) |
| 1122_158 | [LR](A)[sP]•[dR](A)[sP]•[dR](T)[sP]•[LR]([5meC])[sP]•[dR](T)[sP]• |
| | [LR](T)[sP]•[dR](A)[sP]•[dR](T)[sP]•[dR](T)[sP]•[dR](T)[sP]• |
| | [dR](A)[sP]•[dR](C)[sP]•[dR](A)[sP]•[dR](T)[sP]•[dR](C)[ssP]• |
| | [dR](T)[sP]•[LR](T)[sP]•[LR]([5meC])[sP]•[LR]([5meC]) |
| 1122_159 | [LR](A)[sP]•[dR](A)[sP]•[dR](T)[sP]•[LR]([5meC])[sP]•[dR](T)[sP]• |
| | [LR](T)[sP]•[dR](A)[sP]•[dR](T)[sP]•[dR](T)[sP]•[dR](T)[sP]• |
| | [dR](A)[sP]•[dR](C)[sP]•[dR](A)[sP]•[dR](T)[sP]•[dR](C)[sP]• |
| | [dR](T)[ssP]•[LR](T)[sP]•[LR]([5meC])[sP]•[LR]([5meC]) |
| 1122_160 | [LR](A)[sP]•[dR](A)[sP]•[dR](T)[sP]•[LR]([5meC])[sP]•[dR](T)[sP]• |
| | [LR](T)[sP]•[dR](A)[sP]•[dR](T)[sP]•[dR](T)[sP]•[dR](T)[sP]• |
| | [dR](A)[sP]•[dR](C)[sP]•[dR](A)[sP]•[dR](T)[sP]•[dR](C)[sP]• |
| | [dR](T)[sP]•[LR](T)[ssP]•[LR]([5meC])[sP]•[LR]([5meC]) |
| 1122_161 | [LR](A)[sP]•[dR](A)[sP]•[dR](T)[sP]•[LR]([5meC])[sP]•[dR](T)[sP]• |
| | [LR](T)[sP]•[dR](A)[sP]•[dR](T)[sP]•[dR](T)[sP]•[dR](T)[sP]• |
| | [dR](A)[sP]•[dR](C)[sP]•[dR](A)[sP]•[MOE](T)[sP]•[dR](C)[sP]• |
| | [dR](T)[sP]•[LR](T)[sP]•[LR]([5meC])[sP]•[LR]([5meC]) |
| 1122_162 | [LR](A)[sP]•[dR](A)[sP]•[dR](T)[sP]•[LR]([5meC])[sP]•[dR](T)[sP]• |
| | [LR](T)[sP]•[dR](A)[sP]•[dR](T)[sP]•[dR](T)[sP]•[dR](T)[sP]• |
| | [dR](A)[sP]•[dR](C)[sP]•[MOE](A)[sP]•[dR](T)[sP]•[dR](C)[sP]• |
| | [dR](T)[sP]•[LR](T)[sP]•[LR]([5meC])[sP]•[LR]([5meC]) |
| 1122_163 | [LR](A)[sP]•[dR](A)[sP]•[dR](T)[sP]•[LR]([5meC])[sP]•[dR](T)[sP]• |
| | [LR](T)[sP]•[dR](A)[sP]•[dR](T)[sP]•[dR](T)[sP]•[dR](T)[sP]• |
| | [MOE](A)[sP]•[dR](C)[sP]•[dR](A)[sP]•[dR](T)[sP]•[dR](C)[sP]• |
| | [dR](T)[sP]•[LR](T)[sP]•[LR]([5meC])[sP]•[LR]([5meC]) |
| 1122_164 | [LR](A)[sP]•[dR](A)[sP]•[dR](T)[sP]•[LR]([5meC])[sP]•[dR](T)[sP]• |
| | [LR](T)[sP]•[dR](A)[sP]•[dR](T)[sP]•[dR](T)[sP]•[MOE](T)[sP]• |
| | [dR](A)[sP]•[dR](C)[sP]•[dR](A)[sP]•[dR](T)[sP]•[dR](C)[sP]• |
| | [dR](T)[sP]•[LR](T)[sP]•[LR]([5meC])[sP]•[LR]([5meC]) |
| 1122_165 | [LR](A)[sP]•[dR](A)[sP]•[dR](T)[sP]•[LR]([5meC])[sP]•[dR](T)[sP]• |
| | [LR](T)[sP]•[dR](A)[sP]•[dR](T)[sP]•[MOE](T)[sP]•[dR](T)[sP]• |
| | [dR](A)[sP]•[dR](C)[sP]•[dR](A)[sP]•[dR](T)[sP]•[dR](C)[sP]• |
| | [dR](T)[sP]•[LR](T)[sP]•[LR]([5meC])[sP]•[LR]([5meC]) |
| 1122_166 | [LR](A)[sP]•[dR](A)[sP]•[dR](T)[sP]•[LR]([5meC])[sP]•[dR](T)[sP]• |
| | [LR](T)[sP]•[dR](A)[sP]•[MOE](T)[sP]•[dR](T)[sP]•[dR](T)[sP]• |
| | [dR](A)[sP]•[dR](C)[sP]•[dR](A)[sP]•[dR](T)[sP]•[dR](C)[sP]• |
| | [dR](T)[sP]•[LR](T)[sP]•[LR]([5meC])[sP]•[LR]([5meC]) |
| 1122_167 | [LR](A)[sP]•[dR](A)[sP]•[dR](T)[sP]•[LR]([5meC])[sP]•[dR](T)[sP]• |
| | [LR](T)[sP]•[MOE](A)[sP]•[dR](T)[sP]•[dR](T)[sP]•[dR](T)[sP]• |
| | [dR](A)[sP]•[dR](C)[sP]•[dR](A)[sP]•[dR](T)[sP]•[dR](C)[sP]• |
| | [dR](T)[sP]•[LR](T)[sP]•[LR]([5meC])[sP]•[LR]([5meC]) |
| 1122_168 | [LR](A)[sP]•[dR](A)[sP]•[dR](T)[sP]•[LR]([5meC])[sP]•[dR](T)[sP]• |
| | [MOE](T)[sP]•[dR](A)[sP]•[dR](T)[sP]•[dR](T)[sP]•[dR](T)[sP]• |
| | [dR](A)[sP]•[dR](C)[sP]•[dR](A)[sP]•[dR](T)[sP]•[dR](C)[sP]• |
| | [dR](T)[sP]•[LR](T)[sP]•[LR]([5meC])[sP]•[LR]([5meC]) |
| 1122_169 | [LR](A)[sP]•[dR](A)[sP]•[dR](T)[sP]•[LR]([5meC])[sP]•[MOE](T)[sP]• |
| | [LR](T)[sP]•[dR](A)[sP]•[dR](T)[sP]•[dR](T)[sP]•[dR](T)[sP]• |
| | [dR](A)[sP]•[dR](C)[sP]•[dR](A)[sP]•[dR](T)[sP]•[dR](C)[sP]• |
| | [dR](T)[sP]•[LR](T)[sP]•[LR]([5meC])[sP]•[LR]([5meC]) |
| 1122_170 | [LR](A)[sP]•[dR](A)[sP]•[dR](T)[sP]•[MOE]([5meC])[sP]•[dR](T)[sP]• |
| | [LR](T)[sP]•[dR](A)[sP]•[dR](T)[sP]•[dR](T)[sP]•[dR](T)[sP]• |
| | [dR](A)[sP]•[dR](C)[sP]•[dR](A)[sP]•[dR](T)[sP]•[dR](C)[sP]• |
| | [dR](T)[sP]•[LR](T)[sP]•[LR]([5meC])[sP]•[LR]([5meC]) |
| 1122_171 | [LR](A)[sP]•[dR](A)[sP]•[MOE](T)[sP]•[LR]([5meC])[sP]•[dR](T)[sP]• |
| | [LR](T)[sP]•[dR](A)[sP]•[dR](T)[sP]•[dR](T)[sP]•[dR](T)[sP]• |
| | [dR](A)[sP]•[dR](C)[sP]•[dR](A)[sP]•[dR](T)[sP]•[dR](C)[sP]• |
| | [dR](T)[sP]•[LR](T)[sP]•[LR]([5meC])[sP]•[LR]([5meC]) |
| 1122_172 | [LR](A)[sP]•[dR](A)[sP]•[dR](T)[sP]•[LR]([5meC])[sP]•[dR](T)[sP]• |
| | [LR](T)[sP]•[dR](A)[sP]•[dR](T)[sP]•[dR](T)[sP]•[dR](T)[sP]• |
| | [dR](A)[sP]•[dR](C)[sP]•[dR](A)[sP]•[dR](T)[sP]•[mR](C)[sP]• |
| | [dR](T)[sP]•[LR](T)[sP]•[LR]([5meC])[sP]•[LR]([5meC]) |
| 1122_173 | [LR](A)[sP]•[dR](A)[sP]•[dR](T)[sP]•[LR]([5meC])[sP]•[dR](T)[sP]• |
| | [LR](T)[sP]•[dR](A)[sP]•[dR](T)[sP]•[dR](T)[sP]•[dR](T)[sP]• |
| | [dR](A)[sP]•[dR](C)[sP]•[mR](A)[sP]•[dR](T)[sP]•[dR](C)[sP]• |
| | [dR](T)[sP]•[LR](T)[sP]•[LR]([5meC])[sP]•[LR]([5meC]) |
| 1122_174 | [LR](A)[sP]•[dR](A)[sP]•[dR](T)[sP]•[LR]([5meC])[sP]•[dR](T)[sP]• |
| | [LR](T)[sP]•[dR](A)[sP]•[dR](T)[sP]•[dR](T)[sP]•[dR](T)[sP]• |
| | [dR](A)[sP]•[mR](C)[sP]•[dR](A)[sP]•[dR](T)[sP]•[dR](C)[sP]• |
| | [dR](T)[sP]•[LR](T)[sP]•[LR]([5meC])[sP]•[LR]([5meC]) |
| 1122_175 | [LR](A)[sP]•[dR](A)[sP]•[dR](T)[sP]•[LR]([5meC])[sP]•[dR](T)[sP]• |
| | [LR](T)[sP]•[dR](A)[sP]•[dR](T)[sP]•[dR](T)[sP]•[dR](T)[sP]• |
| | [mR](A)[sP]•[dR](C)[sP]•[dR](A)[sP]•[dR](T)[sP]•[dR](C)[sP]• |
| | [dR](T)[sP]•[LR](T)[sP]•[LR]([5meC])[sP]•[LR]([5meC]) |
| 1122_176 | [LR](A)[sP]•[dR](A)[sP]•[dR](T)[sP]•[LR]([5meC])[sP]•[dR](T)[sP]• |
| | [LR](T)[sP]•[mR](A)[sP]•[dR](T)[sP]•[dR](T)[sP]•[dR](T)[sP]• |
| | [dR](A)[sP]•[dR](C)[sP]•[dR](A)[sP]•[dR](T)[sP]•[dR](C)[sP]• |
| | [dR](T)[sP]•[LR](T)[sP]•[LR]([5meC])[sP]•[LR]([5meC]) |
| 1122_177 | [LR](A)[sP]•[dR](A)[sP]•[dR](T)[sP]•[LR]([5meC])[sP]•[dR](T)[sP]• |
| | [LR](T)[sP]•[dR](A)[sP]•[dR](T)[sP]•[dR](T)[sP]•[LR](T)[sP]• |
| | [dR](A)[sP]•[dR](C)[sP]•[dR](A)[sP]•[dR](T)[sP]•[dR](C)[sP]• |
| | [dR](T)[sP]•[LR](T)[sP]•[LR]([5meC])[sP]•[LR]([5meC]) |
| 1122_178 | [LR](A)[sP]•[dR](A)[sP]•[dR](T)[sP]•[LR]([5meC])[sP]•[dR](T)[sP]• |
| | [LR](T)[sP]•[dR](A)[sP]•[dR](T)[sP]•[LR](T)[sP]•[dR](T)[sP]• |
| | [dR](A)[sP]•[dR](C)[sP]•[dR](A)[sP]•[dR](T)[sP]•[dR](C)[sP]• |
| | [dR](T)[sP]•[LR](T)[sP]•[LR]([5meC])[sP]•[LR]([5meC]) |
| 1122_179 | [LR](A)[sP]•[dR](A)[sP]•[dR](T)[sP]•[LR]([5meC])[sP]•[dR](T)[sP]• |
| | [LR](T)[sP]•[dR](A)[sP]•[LR](T)[sP]•[dR](T)[sP]•[dR](T)[sP]• |
| | [dR](A)[sP]•[dR](C)[sP]•[dR](A)[sP]•[dR](T)[sP]•[dR](C)[sP]• |
| | [dR](T)[sP]•[LR](T)[sP]•[LR]([5meC])[sP]•[LR]([5meC]) |
| 1122_180 | [LR](A)[sP]•[dR](A)[sP]•[dR](T)[sP]•[LR]([5meC])[sP]•[dR](T)[sP]• |
| | [LR](T)[sP]•[LR](A)[sP]•[dR](T)[sP]•[dR](T)[sP]•[dR](T)[sP]• |
| | [dR](A)[sP]•[dR](C)[sP]•[dR](A)[sP]•[dR](T)[sP]•[dR](C)[sP]• |
| | [dR](T)[sP]•[LR](T)[sP]•[LR]([5meC])[sP]•[LR]([5meC]) |
| 1122_181 | [LR](A)[sP]•[dR](A)[sP]•[dR](T)[sP]•[LR]([5meC])[sP]•[LR](T)[sP]• |
| | [LR](T)[sP]•[dR](A)[sP]•[dR](T)[sP]•[dR](T)[sP]•[dR](T)[sP]• |
| | [dR](A)[sP]•[dR](C)[sP]•[dR](A)[sP]•[dR](T)[sP]•[dR](C)[sP]• |
| | [dR](T)[sP]•[LR](T)[sP]•[LR]([5meC])[sP]•[LR]([5meC]) |
| 1122_182 | [LR](A)[sP]•[dR](A)[sP]•[LR](T)[sP]•[LR]([5meC])[sP]•[dR](T)[sP]• |
| | [LR](T)[sP]•[dR](A)[sP]•[dR](T)[sP]•[dR](T)[sP]•[dR](T)[sP]• |
| | [dR](A)[sP]•[dR](C)[sP]•[dR](A)[sP]•[dR](T)[sP]•[dR](C)[sP]• |
| | [dR](T)[sP]•[LR](T)[sP]•[LR]([5meC])[sP]•[LR]([5meC]) |
| 1122_183 | [LR](A)[sP]•[dR](A)[sP]•[dR](T)[sP]•[LR]([5meC])[sP]•[dR](T)[sP]• |
| | [LR](T)[sP]•[dR](A)[sP]•[dR](T)[sP]•[dR](T)[sP]•[dR](T)[sP]• |
| | [dR](A)[sP]•[dR](C)[sP]•[dR](A)[sP]•[dR](T)[sP]•[dR](C)[sP]• |
| | [dR](T)[sP]•[LR](T)[sP]•[MOE]([5meC])[sP]•[LR]([5meC]) |
| 1122_184 | [LR](A)[sP]•[dR](A)[sP]•[dR](T)[sP]•[LR]([5meC])[sP]•[dR](T)[sP]• |
| | [LR](T)[sP]•[dR](A)[sP]•[dR](T)[sP]•[dR](T)[sP]•[dR](T)[sP]• |
| | [dR](A)[sP]•[dR](C)[sP]•[dR](A)[sP]•[dR](T)[sP]•[dR](C)[sP]• |
| | [dR](T)[sP]•[MOE](T)[sP]•[LR]([5meC])[sP]•[LR]([5meC]) |
| 1122_185 | [LR](A)[sP]•[dR](A)[sP]•[dR](T)[sP]•[LR]([5meC])[sP]•[dR](T)[sP]• |
| | [LR](T)[sP]•[dR](A)[sP]•[dR](T)[sP]•[dR](T)[sP]•[dR](T)[sP]• |
| | [dR](A)[sP]•[dR](C)[sP]•[dR](A)[sP]•[dR](T)[sP]•[dR](C)[sP]• |
| | [MOE](T)[sP]•[LR](T)[sP]•[LR]([5meC])[sP]•[LR]([5meC]) |
| 1122_186 | [LR](A)[sP]•[LR](A)[sP]•[LR](T)[sP]•[LR]([5meC])[sP]•[dR](T)[sP]• |
| | [dR](T)[sP]•[LR](A)[sP]•[dR](T)[sP]•[dR](T)[sP]•[dR](T)[sP]• |
| | [dR](A)[sP]•[dR](C)[sP]•[dR](A)[sP]•[dR](T)[sP]•[dR](C)[sP]• |
| | [LR](T)[sP]•[dR](T)[sP]•[LR]([5meC])[sP]•[LR]([5meC]) |
| 1122_188 | [MOE](A)[sP]•[MOE](A)[sP]•[MOE](T)[sP]•[MOE]([5meC])[sP]•[dR](T)[sP]• |
| | [dR](T)[sP]•[dR](A)[sP]•[dR](T)[sP]•[dR](T)[sP]•[dR](T)[sP]• |
| | [dR](A)[sP]•[dR](C)[sP]•[dR](A)[sP]•[dR](T)[sP]•[dR](C)[sP]• |
| | [MOE](T)[sP]•[dR](T)[sP]•[MOE]([5meC])[sP]•[MOE]([5meC]) |
| 1122_189 | [MOE](A)[sP]•[LR](A)[sP]•[LR](T)[sP]•[LR]([5meC])[sP]•[dR](T)[sP]• |
| | [dR](T)[sP]•[dR](A)[sP]•[dR](T)[sP]•[dR](T)[sP]•[dR](T)[sP]• |
| | [dR](A)[sP]•[dR](C)[sP]•[dR](A)[sP]•[dR](T)[sP]•[dR](C)[sP]• |
| | [LR](T)[sP]•[dR](T)[sP]•[LR]([5meC])[sP]•[MOE]([5meC]) |
| 1122_190 | [MOE](A)[sP]•[MOE](A)P•[MOE](T)P•[MOE]([5meC])[sP]•[dR](T)[sP]• |
| | [dR](T)[sP]•[dR](A)[sP]•[dR](T)[sP]•[dR](T)[sP]•[dR](T)[sP]• |
| | [dR](A)[sP]•[dR](C)[sP]•[dR](A)[sP]•[dR](T)[sP]•[dR](C)[sP]• |
| | [MOE](T)[sP]•[dR](T)[sP]•[MOE]([5meC])[sP]•[MOE]([5meC]) |
| 1122_191 | [LR](A)[sP]•[fR](A)[sP]•[LR](T)[sP]•[LR]([5meC])[sP]•[dR](T)[sP]• |
| | [dR](T)[sP]•[dR](A)[sP]•[dR](T)[sP]•[dR](T)[sP]•[dR](T)[sP]• |
| | [dR](A)[sP]•[dR](C)[sP]•[dR](A)[sP]•[dR](T)[sP]•[dR](C)[sP]• |
| | [LR](T)[sP]•[dR](T)[sP]•[LR]([5meC])[sP]•[LR]([5meC]) |
| 1122_192 | [LR](A)[sP]•[LR](A)[sP]•[LR](T)[sP]•[LR]([5meC])[sP]•[dR](T)[sP]• |
| | [dR](T)[sP]•[dR](A)[sP]•[dR](T)[sP]•[dR](T)[sP]•[dR](T)[sP]• |
| | [dR](A)[sP]•[dR](C)[sP]•[dR](A)[sP]•[dR](T)[sP]•[fR](C)[sP]• |
| | [LR](T)[sP]•[dR](T)[sP]•[LR]([5meC])[sP]•[LR]([5meC]) |
| 1122_193 | [LR](A)[sP]•[LR](A)[sP]•[LR](T)[sP]•[LR]([5meC])[sP]•[dR](T)[sP]• |
| | [dR](T)[sP]•[dR](A)[sP]•[dR](T)[sP]•[dR](T)[sP]•[dR](T)[sP]• |
| | [dR](A)[sP]•[dR](C)[sP]•[fR](A)[sP]•[dR](T)[sP]•[dR](C)[sP]• |
| | [LR](T)[sP]•[dR](T)[sP]•[LR]([5meC])[sP]•[LR]([5meC]) |
| 1122_194 | [LR](A)[sP]•[LR](A)[sP]•[LR](T)[sP]•[LR]([5meC])[sP]•[dR](T)[sP]• |
| | [dR](T)[sP]•[dR](A)[sP]•[dR](T)[sP]•[dR](T)[sP]•[dR](T)[sP]• |
| | [dR](A)[sP]•[fR](C)[sP]•[dR](A)[sP]•[dR](T)[sP]•[dR](C)[sP]• |
| | [LR](T)[sP]•[dR](T)[sP]•[LR]([5meC])]sP]•[LR]([5meC]) |
| 1122_195 | [LR](A)[sP]•[LR](A)[sP]•[LR](T)[sP]•[LR]([5meC])[sP]•[dR](T)[sP]• |
| | [dR](T)[sP]•[dR](A)[sP]•[dR](T)[sP]•[dR](T)[sP]•[dR](T)[sP]• |
| | [fR](A)[sP]•[dR](C)[sP]•[dR](A)[sP]•[dR](T)[sP]•[dR](C)[sP]• |
| | [LR](T)[sP]•[dR](T)[sP]•[LR]([5meC])[sP]•[LR]([5meC]) |
| 1122_196 | [LR](A)[sP]•[LR](A)[sP]•[LR](T)[sP]•[LR]([5meC])[sP]•[dR](T)[sP]• |
| | [dR](T)[sP]•[fR](A)[sP]•[dR](T)[sP]•[dR](T)[sP]•[dR](T)[sP]• |
| | [dR](A)[sP]•[dR](C)[sP]•[dR](A)[sP]•[dR](T)[sP]•[dR](C)[sP]• |
| | [LR](T)[sP]•[dR](T)[sP]•[LR]([5meC])[sP]•[LR]([5meC]) |
| 1122_197 | [LR](A)[sP]•[LR](A)[sP]•[LR](T)[sP]•[LR]([5meC])[sP]•[dR](T)[sP]• |
| | [dR](T)[sP]•[dR](A)[sP]•[dR](T)[sP]•[dR](T)[sP]•[dR](T)[sP]• |
| | [dR](A)[sP]•[dR](C)[sP]•[dR](A)[sP]•[dR](T)[sP]•[dR](C)[sP]• |
| | [LR](T)[sP]•[LR](T)[sP]•[LR]([5meC])[sP]•[LR]([5meC]) |
| 1122_198 | [LR](A)[sP]•[LR](A)[sP]•[LR](T)[sP]•[LR]([5meC])[sP]•[dR](T)[sP]• |
| | [dR](T)[sP]•[dR](A)[sP]•[dR](T)[sP]•[dR](T)[sP]•[dR](T)[sP]• |
| | [dR](A)[sP]•[dR](C)[sP]•[dR](A)[sP]•[LR](T)[sP]•[dR](C)[sP]• |
| | [LR](T)[sP]•[dR](T)[sP]•[LR]([5meC])[sP]•[LR]([5meC]) |
| 1122_199 | [LR](A)[sP]•[LR](A)[sP]•[LR](T)[sP]•[LR]([5meC])[sP]•[dR](T)[sP]• |
| | [dR](T)[sP]•[dR](A)[sP]•[dR](T)[sP]•[dR](T)[sP]•[dR](T)[sP]• |
| | [dR](A)[sP]•[dR](C)[sP]•[LR](A)[sP]•[dR](T)[sP]•[dR](C)[sP]• |
| | [LR](T)[sP]•[dR](T)[sP]•[LR]([5meC])[sP]•[LR]([5meC]) |
| 1122_200 | [LR](A)[sP]•[LR](A)[sP]•[LR](T)[sP]•[LR]([5meC])[sP]•[dR](T)[sP]• |
| | [dR](T)[sP]•[dR](A)[sP]•[dR](T)[sP]•[dR](T)[sP]•[dR](T)[sP]• |
| | [LR](A)[sP]•[dR](C)[sP]•[dR](A)[sP]•[dR](T)[sP]•[dR](C)[sP]• |
| | [LR](T)[sP]•[dR](T)[sP]•[LR]([5meC])]sP]•[LR]([5meC]) |
| 1122_201 | [LR](A)[sP]•[LR](A)[sP]•[LR](T)[sP]•[LR]([5meC])[sP]•[dR](T)[sP]• |
| | [dR](T)[sP]•[dR](A)[sP]•[dR](T)[sP]•[dR](T)[sP]•[LR](T)[sP]• |
| | [dR](A)[sP]•[dR](C)[sP]•[dR](A)[sP]•[dR](T)[sP]•[dR](C)[sP]• |
| | [LR](T)[sP]•[dR](T)[sP]•[LR]([5meC])[sP]•[LR]([5meC]) |
| 1122_202 | [LR](A)[sP]•[LR](A)[sP]•[LR](T)[sP]•[LR]([5meC])[sP]•[dR](T)[sP]• |
| | [dR](T)[sP]•[dR](A)[sP]•[dR](T)[sP]•[LR](T)[sP]•[dR](T)[sP]• |
| | [dR](A)[sP]•[dR](C)[sP]•[dR](A)[sP]•[dR](T)[sP]•[dR](C)[sP]• |
| | [LR](T)[sP]•[dR](T)[sP]•[LR]([5meC])]sP]•[LR]([5meC]) |
| 1122_203 | [LR](A)[sP]•[LR](A)[sP]•[LR](T)[sP]•[LR]([5meC])[sP]•[dR](T)[sP]• |
| | [dR](T)[sP]•[dR](A)[sP]•[LR](T)[sP]•[dR](T)[sP]•[dR](T)[sP]• |
| | [dR](A)[sP]•[dR](C)[sP]•[dR](A)[sP]•[dR](T)[sP]•[dR](C)[sP]• |
| | [LR](T)[sP]•[dR](T)[sP]•[LR]([5meC])]sP]•[LR]([5meC]) |
| 1122_204 | [LR](A)[sP]•[LR](A)[sP]•[LR](T)[sP]•[LR]([5meC])[sP]•[LR](T)[sP]• |
| | [dR](T)[sP]•[dR](A)[sP]•[dR](T)[sP]•[dR](T)[sP]•[dR](T)[sP]• |
| | [dR](A)[sP]•[dR](C)[sP]•[dR](A)[sP]•[dR](T)[sP]•[dR](C)[sP]• |
| | [LR](T)[sP]•[dR](T)[sP]•[LR]([5meC])[sP]•[LR]([5meC]) |
| 1122_205 | [LR](A)[sP]•[LR](A)[sP]•[LR](T)[sP]•[LR]([5meC])[sP]•[dR](T)[sP]• |
| | [dR](T)[sP]•[dR](A)[sP]•[dR](T)[sP]•[dR](T)[sP]•[dR](T)[sP]• |
| | [dR](A)[sP]•[dR](C)[sP]•[dR](A)[sP]•[dR](T)[sP]•[dR](C)[sP]• |
| | [LR](T)[sP]•[dR](T)[sP]•[MOE]([5meC])[sP]•[LR]([5meC]) |
| 1122_206 | [LR](A)[sP]•[LR](A)[sP]•[LR](T)[sP]•[LR]([5meC])[sP]•[dR](T)[sP]• |
| | [dR](T)[sP]•[dR](A)[sP]•[dR](T)[sP]•[dR](T)[sP]•[dR](T)[sP]• |
| | [dR](A)[sP]•[dR](C)[sP]•[dR](A)[sP]•[dR](T)[sP]•[dR](C)[sP]• |
| | [LR](T)[sP]•[MOE](T)[sP]•[LR]([5meC])[sP]•[LR]([5meC]) |
| 1122_207 | [LR](A)[sP]•[LR](A)[sP]•[LR](T)[sP]•[LR]([5meC])[sP]•[dR](T)[sP]• |
| | [dR](T)[sP]•[dR](A)[sP]•[dR](T)[sP]•[dR](T)[sP]•[dR](T)[sP]• |
| | [dR](A)[sP]•[dR](C)[sP]•[dR](A)[sP]•[dR](T)[sP]•[dR](C)[sP]• |
| | [MOE](T)[sP]•[dR](T)[sP]•[LR]([5meC])[sP]•[LR]([5meC]) |
| 1122_208 | [LR](A)[sP]•[LR](A)[sP]•[LR](T)[sP]•[LR]([5meC])[sP]•[dR](T)[sP]• |
| | [dR](T)[sP]•[dR](A)[sP]•[dR](T)[sP]•[dR](T)[sP]•[dR](T)[sP]• |
| | [dR](A)[sP]•[dR](C)[sP]•[dR](A)[sP]•[MOE](T)[sP]•[dR](C)[sP]• |
| | [LR](T)[sP]•[dR](T)[sP]•[LR]([5meC])[sP]•[LR]([5meC]) |
| 1122_209 | [LR](A)[sP]•[LR](A)[sP]•[LR](T)[sP]•[LR]([5meC])[sP]•[dR](T)[sP]• |
| | [dR](T)[sP]•[dR](A)[sP]•[dR](T)[sP]•[dR](T)[sP]•[dR](T)[sP]• |
| | [dR](A)[sP]•[dR](C)[sP]•[MOE](A)[sP]•[dR](T)[sP]•[dR](C)[sP]• |
| | [LR](T)[sP]•[dR](T)[sP]•[LR]([5meC])[sP]•[LR]([5meC]) |
| 1122_210 | [LR](A)[sP]•[LR](A)[sP]•[LR](T)[sP]•[LR]([5meC])[sP]•[dR](T)[sP]• |
| | [dR](T)[sP]•[dR](A)[sP]•[dR](T)[sP]•[dR](T)[sP]•[dR](T)[sP]• |
| | [MOE](A)[sP]•[dR](C)[sP]•[dR](A)[sP]•[dR](T)[sP]•[dR](C)[sP]• |
| | [LR](T)[sP]•[dR](T)[sP]•[LR]([5meC])[sP]•[LR]([5meC]) |
| 1122_211 | [LR](A)[sP]•[LR](A)[sP]•[LR](T)[sP]•[LR]([5meC])[sP]•[dR](T)[sP]• |
| | [dR](T)[sP]•[dR](A)[sP]•[dR](T)[sP]•[dR](T)[sP]•[MOE](T)[sP]• |
| | [dR](A)[sP]•[dR](C)[sP]•[dR](A)[sP]•[dR](T)[sP]•[dR](C)[sP]• |
| | [LR](T)[sP]•[dR](T)[sP]•[LR]([5meC])[sP]•[LR]([5meC]) |
| 1122_212 | [LR](A)[sP]•[LR](A)[sP]•[LR](T)[sP]•[LR]([5meC])[sP]•[dR](T)[sP]• |
| | [dR](T)[sP]•[dR](A)[sP]•[dR](T)[sP]•[MOE](T)[sP]•[dR](T)[sP]• |
| | [dR](A)[sP]•[dR](C)[sP]•[dR](A)[sP]•[dR](T)[sP]•[dR](C)[sP]• |
| | [LR](T)[sP]•[dR](T)[sP]•[LR]([5meC])[sP]•[LR]([5meC]) |
| 1122_213 | [LR](A)[sP]•[LR](A)[sP]•[LR](T)[sP]•[LR]([5meC])[sP]•[dR](T)[sP]• |
| | [dR](T)[sP]•[dR](A)[sP]•[MOE](T)[sP]•[dR](T)[sP]•[dR](T)[sP]• |
| | [dR](A)[sP]•[dR](C)[sP]•[dR](A)[sP]•[dR](T)[sP]•[dR](C)[sP]• |
| | [LR](T)[sP]•[dR](T)[sP]•[LR]([5meC])[sP]•[LR]([5meC]) |
| 1122_214 | [LR](A)[sP]•[LR](A)[sP]•[LR](T)[sP]•[LR]([5meC])[sP]•[dR](T)[sP]• |
| | [dR](T)[sP]•[MOE](A)[sP]•[dR](T)[sP]•[dR](T)[sP]•[dR](T)[sP]• |
| | [dR](A)[sP]•[dR](C)[sP]•[dR](A)[sP]•[dR](T)[sP]•[dR](C)[sP]• |
| | [LR](T)[sP]•[dR](T)[sP]•[LR]([5meC])[sP]•[LR]([5meC]) |
| 1122_215 | [LR](A)[sP]•[LR](A)[sP]•[LR](T)[sP]•[LR]([5meC])[sP]•[dR](T)[sP]• |
| | [MOE](T)[sP]•[dR](A)[sP]•[dR](T)[sP]•[dR](T)[sP]•[dR](T)[sP]• |
| | [dR](A)[sP]•[dR](C)[sP]•[dR](A)[sP]•[dR](T)[sP]•[dR](C)[sP]• |
| | [LR](T)[sP]•[dR](T)[sP]•[LR]([5meC])[sP]•[LR]([5meC]) |
| 1122_216 | [LR](A)[sP]•[LR](A)[sP]•[LR](T)[sP]•[LR]([5meC])[sP]•[MOE](T)[sP]• |
| | [dR](T)[sP]•[dR](A)[sP]•[dR](T)[sP]•[dR](T)[sP]•[dR](T)[sP]• |
| | [dR](A)[sP]•[dR](C)[sP]•[dR](A)[sP]•[dR](T)[sP]•[dR](C)[sP]• |
| | [LR](T)[sP]•[dR](T)[sP]•[LR]([5meC])[sP]•[LR]([5meC]) |
| 1122_217 | [LR](A)[sP]•[LR](A)[sP]•[LR](T)[sP]•[MOE]([5meC])[sP]•[dR](T)[sP]• |
| | [dR](T)[sP]•[dR](A)[sP]•[dR](T)[sP]•[dR](T)[sP]•[dR](T)[sP]• |
| | [dR](A)[sP]•[dR](C)[sP]•[dR](A)[sP]•[dR](T)[sP]•[dR](C)[sP]• |
| | [LR](T)[sP]•[dR](T)[sP]•[LR]([5meC])[sP]•[LR]([5meC]) |
| 1122_218 | [LR](A)[sP]•[LR](A)[sP]•[MOE](T)[sP]•[LR]([5meC])[sP]•[dR](T)[sP]• |
| | [dR](T)[sP]•[dR](A)[sP]•[dR](T)[sP]•[dR](T)[sP]•[dR](T)[sP]• |
| | [dR](A)[sP]•[dR](C)[sP]•[dR](A)[sP]•[dR](T)[sP]•[dR](C)[sP]• |
| | [LR](T)[sP]•[dR](T)[sP]•[LR]([5meC])[sP]•[LR]([5meC]) |
| 1122_219 | [LR](A)[sP]•[MOE](A)[sP]•[LR](T)[sP]•[LR]([5meC])[sP]•[dR](T)[sP]• |
| | [dR](T)[sP]•[dR](A)[sP]•[dR](T)[sP]•[dR](T)[sP]•[dR](T)[sP]• |
| | [dR](A)[sP]•[dR](C)[sP]•[dR](A)[sP]•[dR](T)[sP]•[dR](C)[sP]• |
| | [LR](T)[sP]•[dR](T)[sP]•[LR]([5meC])[sP]•[LR]([5meC]) |
| 1122_220 | [LR](A)[sP]•[LR](A)[sP]•[LR](T)[sP]•[LR]([5meC])[sP]•[dR](T)[sP]• |
| | [dR](T)[sP]•[dR](A)[sP]•[dR](T)[sP]•[dR](T)[sP]•[dR](T)[sP]• |
| | [dR](A)[sP]•[dR](C)[sP]•[dR](A)[sP]•[dR](T)[sP]•[mR](C)[sP]• |
| | [LR](T)[sP]•[dR](T)[sP]•[LR]([5meC])[sP]•[LR]([5meC]) |
| 1122_221 | [LR](A)[sP]•[LR](A)[sP]•[LR](T)[sP]•[LR]([5meC])[sP]•[dR](T)[sP]• |
| | [dR](T)[sP]•[dR](A)[sP]•[dR](T)[sP]•[dR](T)[sP]•[dR](T)[sP]• |
| | [dR](A)[sP]•[dR](C)[sP]•[mR](A)[sP]•[dR](T)[sP]•[dR](C)[sP]• |
| | [LR](T)[sP]•[dR](T)[sP]•[LR]([5meC])[sP]•[LR]([5meC]) |
| 1122_222 | [LR](A)[sP]•[LR](A)[sP]•[LR](T)[sP]•[LR]([5meC])[sP]•[dR](T)[sP]• |
| | [dR](T)[sP]•[dR](A)[sP]•[dR](T)[sP]•[dR](T)[sP]•[dR](T)[sP]• |
| | [dR](A)[sP]•[mR](C)[sP]•[dR](A)[sP]•[dR](T)[sP]•[dR](C)[sP]• |
| | [LR](T)[sP]•[dR](T)[sP]•[LR]([5meC])[sP]•[LR]([5meC]) |
| 1122_223 | [LR](A)[sP]•[LR](A)[sP]•[LR](T)[sP]•[LR]([5meC])[sP]•[dR](T)[sP]• |
| | [dR](T)[sP]•[dR](A)[sP]•[dR](T)[sP]•[dR](T)[sP]•[dR](T)[sP]• |
| | [mR](A)[sP]•[dR](C)[sP]•[dR](A)[sP]•[dR](T)[sP]•[dR](C)[sP]• |
| | [LR](T)[sP]•[dR](T)[sP]•[LR]([5meC])[sP]•[LR]([5meC]) |
| 1122_224 | [LR](A)[sP]•[LR](A)[sP]•[LR](T)[sP]•[LR]([5meC])[sP]•[dR](T)[sP]• |
| | [dR](T)[sP]•[mR](A)[sP]•[dR](T)[sP]•[dR](T)[sP]•[dR](T)[sP]• |
| | [dR](A)[sP]•[dR](C)[sP]•[dR](A)[sP]•[dR](T)[sP]•[dR](C)[sP]• |
| | [LR](T)[sP]•[dR](T)[sP]•[LR]([5meC])[sP]•[LR]([5meC]) |
| 1122_225 | [LR](A)[sP]•[mR](A)[sP]•[LR](T)[sP]•[LR]([5meC])[sP]•[dR](T)[sP]• |
| | [dR](T)[sP]•[dR](A)[sP]•[dR](T)[sP]•[dR](T)[sP]•[dR](T)[sP]• |
| | [dR](A)[sP]•[dR](C)[sP]•[dR](A)[sP]•[dR](T)[sP]•[dR](C)[sP]• |
| | [LR](T)[sP]•[dR](T)[sP]•[LR]([5meC])[sP]•[LR]([5meC]) |
| 1122_226 | [MOE](A)[sP]•[dR](A)[sP]•[dR](T)[sP]•[MOE]([5meC])[sP]•[dR](T)[sP]• |
| | [MOE](T)[sP]•[dR](A)[sP]•[dR](T)[sP]•[dR](T)[sP]•[dR](T)[sP]• |
| | [dR](A)[sP]•[dR](C)[sP]•[dR](A)[sP]•[dR](T)[sP]•[dR](C)[sP]• |
| | [dR](T)[sP]•[MOE](T)[sP]•[MOE]([5meC])[sP]•[MOE]([5meC]) |
| 1122_227 | [MOE](A)[sP]•[dR](A)[sP]•[dR](T)[sP]•[LR]([5meC])[sP]•[dR](T)[sP]• |
| | [LR](T)[sP]•[dR](A)[sP]•[dR](T)[sP]•[dR](T)[sP]•[dR](T)[sP]• |
| | [dR](A)[sP]•[dR](C)[sP]•[dR](A)[sP]•[dR](T)[sP]•[dR](C)[sP]• |
| | [dR](T)[sP]•[LR](T)[sP]•[LR]([5meC])[sP]•[MOE]([5meC]) |
| 1122_228 | [MOE](A)[sP]•[LR](A)[sP]•[LR](T)[sP]•[LR]([5meC])[sP]•[dR](T)[sP]• |
| | [LR](T)[sP]•[dR](A)[sP]•[dR](T)[sP]•[dR](T)[sP]•[dR](T)[sP]• |
| | [dR](A)[sP]•[dR](C)[sP]•[dR](A)[sP]•[dR](T)[sP]•[dR](C)[sP]• |
| | [dR](T)[sP]•[LR](T)[sP]•[LR]([5meC])[sP]•[LR]([5meC]) |
| 1122_229 | [LR](A)[sP]•[fR](A)[sP]•[dR](T)[sP]•[LR]([5meC])[sP]•[dR](T)[sP]• |
| | [LR](T)[ sP]•[dR](A)[sP]•[dR](T)[sP]•[dR](T)[sP]•[dR](T)[sP]• |
| | [dR](A)[sP]•[dR](C)[sP]•[dR](A)[sP]•[dR](T)[sP]•[dR](C)[sP]• |
| | [dR](T)[sP]•[LR](T)[sP]•[LR]([5meC] )[sP]•[LR]([5meC]) |
| 1122_230 | [LR](A)[sP]•[LR](A)[sP]•[dR](T)[sP]•[LR]([5meC])[sP]•[dR](T)[sP]• |
| | [LR](T)[sP]•[dR](A)[sP]•[dR](T)[sP]•[dR](T)[sP]•[dR](T)[sP]• |
| | [dR](A)[sP]•[dR](C)[sP]•[dR](A)[sP]•[dR](T)[sP]•[dR](C)[sP]• |
| | [dR](T)[sP]•[LR](T)[sP]•[LR]([5meC])[sP]•[LR]([5meC]) |
| 1122_231 | [LR](A)[sP]•[MOE](A)[sP]•[dR](T)[sP]•[LR]([5meC])[sP]•[dR](T)[sP]• |
| | [LR](T)[sP]•[dR](A)[sP]•[dR](T)[sP]•[dR](T)[sP]•[dR](T)[sP]• |
| | [dR](A)[sP]•[dR](C)[sP]•[dR](A)[sP]•[dR](T)[sP]•[dR](C)[sP]• |
| | [dR](T)[sP]•[LR](T)[sP]•[LR]([5meC])[sP]•[LR]([5meC]) |
| 1122_232 | [LR](A)[sP]•[mR](A)[sP]•[dR](T)[sP]•[LR]([5meC])[sP]•[dR](T)[sP]• |
| | [LR](T)[sP]•[dR](A)[sP]•[dR](T)[sP]•[dR](T)[sP]•[dR](T)[sP]• |
| | [dR](A)[sP]•[dR](C)[sP]•[dR](A)[sP]•[dR](T)[sP]•[dR](C)[sP]• |
| | [dR](T)[sP]•[LR](T)[sP]•[LR]([5meC])[sP]•[LR]([5meC]) |
| 1122_233 | [LR](A)[sP]•[MOE](A)P•[MOE](T)[sP]•[LR]([5meC])[sP]•[dR](T)[sP]• |
| | [LR](T)[sP]•[dR](A)[sP]•[dR](T)[sP]•[dR](T)[sP]•[dR](T)[sP]• |
| | [dR](A)[sP]•[dR](C)[sP]•[dR](A)[sP]•[dR](T)[sP]•[dR](C)[sP]• |
| | [dR](T)[sP]•[LR](T)[sP]•[LR]([5meC])[sP]•[LR]([5meC]) |
| 1122_234 | [LR](A)[sP]•[LR](A)[sP]•[LR](T)[sP]•[LR]([5meC])[sP]•[dR](T)[sP]• |
| | [LR](T)[sP]•[dR](A)[sP]•[dR](T)[sP]•[dR](T)[sP]•[dR](T)[sP]• |
| | [dR](A)[sP]•[dR](C)[sP]•[dR](A)[sP]•[dR](T)[sP]•[dR](C)[sP]• |
| | [dR](T)[sP]•[LR](T)[sP]•[LR]([5meC])[sP]•[LR]([5meC]) |
| 1122_235 | [LR](A)[sP]•[MOE](A)[sP]•[MOE](T)[sP]•[LR]([5meC])[sP]•[dR](T)[sP]• |
| | [LR](T)[sP]•[dR](A)[sP]•[dR](T)[sP]•[dR](T)[sP]•[dR](T)[sP]• |
| | [dR](A)[sP]•[dR](C)[sP]•[dR](A)[sP]•[dR](T)[sP]•[dR](C)[sP]• |
| | [dR](T)[sP]•[LR](T)[sP]•[LR]([5meC])[sP]•[LR]([5meC]) |
| 1122_236 | [LR](A)[sP]•[dR](A)[sP]•[dR](T)[sP]•[LR]([5meC])[sP]•[dR](T)[sP]• |
| | [LR](T)[sP]•[dR](A)[sP]•[dR](T)[sP]•[dR](T)[sP]•[dR](T)[sP]• |
| | [dR](A)[sP]•[dR](C)[sP]•[dR](A)[sP]•[dR](T)[sP]•[fR](C)[sP]• |
| | [dR](T)[sP]•[LR](T)[sP]•[LR]([5meC])[sP]•[LR]([5meC]) |
| 1122_237 | [LR](A)[sP]•[dR](A)[sP]•[dR](T)[sP]•[LR]([5meC])[sP]•[dR](T)[sP]• |
| | [LR](T)[sP]•[dR](A)[sP]•[dR](T)[sP]•[dR](T)[sP]•[dR](T)[sP]• |
| | [dR](A)[sP]•[dR](C)[sP]•[fR](A)[sP]•[dR](T)[sP]•[dR](C)[sP]• |
| | [dR](T)[sP]•[LR](T)[sP]•[LR]([5meC])[sP]•[LR]([5meC]) |
| 1122_238 | [MOE](A)[sP]•[dR](A)[sP]•[dR](T)[sP]•[MOE]([5meC])[sP]•[dR](T)[sP]• |
| | [MOE](T)[sP]•[dR](A)[sP]•[dR](T)[sP]•[dR](T)[sP]•[dR](T)[sP]• |
| | [dR](A)[sP]•[dR](C)[sP]•[dR](A)[sP]•[dR](T)[sP]•[dR](C)[sP]• |
| | [MOE](T)[sP]•[dR](T)[sP]•[MOE]([5meC])[sP]•[MOE]([5meC]) |
| 1122_239 | [MOE](A)[sP]•[dR](A)[sP]•[dR](T)[sP]•[LR]([5meC])[sP]•[dR](T)[sP]• |
| | [LR](T)[sP]•[dR](A)[sP]•[dR](T)[sP]•[dR](T)[sP]•[dR](T)[sP]• |
| | [dR](A)[sP]•[dR](C)[sP]•[dR](A)[sP]•[dR](T)[sP]•[dR](C)[sP]• |
| | [LR](T)[sP]•[dR](T)[sP]•[LR]([5meC])[sP]•[MOE]([5meC]) |
| 1122_240 | [MOE](A)[sP]•[LR](A)[sP]•[LR](T)[sP]•[LR]([5meC])[sP]•[dR](T)[sP]• |
| | [LR](T)[sP]•[dR](A)[sP]•[dR](T)[sP]•[dR](T)[sP]•[dR](T)[sP]• |
| | [dR](A)[sP]•[dR](C)[sP]•[dR](A)[sP]•[dR](T)[sP]•[dR](C)[sP]• |
| | [LR](T)[sP]•[dR](T)[sP]•[LR]([5meC])[sP]•[LR]([5meC]) |
| 1122_241 | [LR](A)[sP]•[fR](A)[sP]•[dR](T)[sP]•[LR]([5meC])[sP]•[dR](T)[sP]• |
| | [LR](T)[sP]•[dR](A)[sP]•[dR](T)[sP]•[dR](T)[sP]•[dR](T)[sP]• |
| | [dR](A)[sP]•[dR](C)[sP]•[dR](A)[sP]•[dR](T)[sP]•[dR](C)[sP]• |
| | [LR](T)[sP]•[dR](T)[sP]•[LR]([5meC])[sP]•[LR]([5meC]) |
| 1122_242 | [LR](A)[sP]•[MOE](A)[sP]•[dR](T)[sP]•[LR]([5meC])[sP]•[dR](T)[sP]• |
| | [LR](T)[sP]•[dR](A)[sP]•[dR](T)[sP]•[dR](T)[sP]•[dR](T)[sP]• |
| | [dR](A)[sP]•[dR](C)[sP]•[dR](A)[sP]•[dR](T)[sP]•[dR](C)[sP]• |
| | [LR](T)[sP]•[dR](T)[sP]•[LR]([5meC])[sP]•[LR]([5meC]) |
| 1122_243 | [LR](A)[sP]•[mR](A)[sP]•[dR](T)[sP]•[LR]([5meC])[sP]•[dR](T)[sP]• |
| | [LR](T)[sP]•[dR](A)[sP]•[dR](T)[sP]•[dR](T)[sP]•[dR](T)[sP]• |
| | [dR](A)[sP]•[dR](C)[sP]•[dR](A)[sP]•[dR](T)[sP]•[dR](C)[sP]• |
| | [LR](T)[sP]•[dR](T)[sP]•[LR]([5meC])[sP]•[LR]([5meC]) |
| 1122_244 | [LR](A)[sP]•[MOE](A)P•[MOE](T)[sP]•[LR]([5meC])[sP]•[dR](T)[sP]• |
| | [LR](T)[sP]•[dR](A)[sP]•[dR](T)[sP]•[dR](T)[sP]•[dR](T)[sP]• |
| | [dR](A)[sP]•[dR](C)[sP]•[dR](A)[sP]•[dR](T)[sP]•[dR](C)[sP]• |
| | [LR](T)[sP]•[dR](T)[sP]•[LR]([5meC])[sP]•[LR]([5meC]) |
| 1122_245 | [LR](A)[sP]•[LR](A)[sP]•[LR](T)[sP]•[LR]([5meC])[sP]•[dR](T)[sP]• |
| | [LR](T)[sP]•[dR](A)[sP]•[dR](T)[sP]•[dR](T)[sP]•[dR](T)[sP]• |
| | [dR](A)[sP]•[dR](C)[sP]•[dR](A)[sP]•[dR](T)[sP]•[dR](C)[sP]• |
| | [LR](T)[sP]•[dR](T)[sP]•[LR]([5meC])[sP]•[LR]([5meC]) |
| 1122_247 | [LR](A)[sP]•[MOE](A)[sP]•[MOE](T)[sP]•[LR]([5meC])[sP]•[dR](T)[sP]• |
| | [LR](T)[sP]•[dR](A)[sP]•[dR](T)[sP]•[dR](T)[sP]•[dR](T)[sP]• |
| | [dR](A)[sP]•[dR](C)[sP]•[dR](A)[sP]•[dR](T)[sP]•[dR](C)[sP]• |
| | [LR](T)[sP]•[dR](T)[sP]•[LR]([5meC])[sP]•[LR]([5meC]) |
| 1122_248 | [MOE](A)[sP]•[MOE](A)[sP]•[dR](T)[sP]•[MOE]([5meC])[sP]•[MOE](T)[sP]• |
| | [dR](T)[sP]•[mR](A)[sP]•[dR](T)[sP]•[dR](T)[sP]•[dR](T)[sP]• |
| | [dR](A)[sP]•[dR](C)[sP]•[dR](A)[sP]•[dR](T)[sP]•[dR](C)[sP]• |
| | [dR](T)[sP]•[MOE](T)[sP]•[MOE]([5meC])[sP]•[MOE]([5meC]) |
| 1122_249 | [MOE](A)[sP]•[LR](A)[sP]•[dR](T)[sP]•[LR]([5meC])[sP]•[LR](T)[sP]• |
| | [dR](T)[sP]•[mR](A)[sP]•[dR](T)[sP]•[dR](T)[sP]•[dR](T)[sP]• |
| | [dR](A)[sP]•[dR](C)[sP]•[dR](A)[sP]•[dR](T)[sP]•[dR](C)[sP]• |
| | [dR](T)[sP]•[LR](T)[sP]•[LR]([5meC])[sP]•[MOE]([5meC]) |
| 1122_250 | [MOE](A)[sP]•[MOE](A)[sP]•[dR](T)[sP]•[MOE]([5meC])P•[MOE](T)[sP]• |
| | [dR](T)[sP]•[mR](A)[sP]•[dR](T)[sP]•[dR](T)[sP]•[dR](T)[sP]• |
| | [dR](A)[sP]•[dR](C)[sP]•[dR](A)[sP]•[dR](T)[sP]•[dR](C)[sP]• |
| | [dR](T)[sP]•[MOE](T)[sP]•[MOE]([5meC])[sP]•[MOE]([5meC]) |
| 1122_251 | [MOE](A)[sP]•[MOE](A)[sP]•[dR](T)[sP]•[MOE]([5meC])[sP]•[dR](T)[sP]• |
| | [dR](T)[sP]•[MOE](A)[sP]•[dR](T)[sP]•[dR](T)[sP]•[dR](T)[sP]• |
| | [dR](A)[sP]•[dR](C)[sP]•[dR](A)[sP]•[dR](T)[sP]•[dR](C)[sP]• |
| | [MOE](T)[sP]•[dR](T)[sP]•[MOE]([5meC])[sP]•[MOE]([5meC]) |
| 1122_252 | [MOE](A)[sP]•[LR](A)[sP]•[dR](T)[sP]•[LR]([5meC])[sP]•[dR](T)[sP]• |
| | [dR](T)[sP]•[LR](A)[sP]•[dR](T)[sP]•[dR](T)[sP]•[dR](T)[sP]• |
| | [dR](A)[sP]•[dR](C)[sP]•[dR](A)[sP]•[dR](T)[sP]•[dR](C)[sP]• |
| | [LR](T)[sP]•[dR](T)[sP]•[LR]([5meC])[sP]•[MOE]([5meC]) |
| 1122_253 | [LR](A)[sP]•[fR](A)[sP]•[dR](T)[sP]•[LR]([5meC])[sP]•[dR](T)[sP]• |
| | [dR](T)[sP]•[LR](A)[sP]•[dR](T)[sP]•[dR](T)[sP]•[dR](T)[sP]• |
| | [dR](A)[sP]•[dR](C)[sP]•[dR](A)[sP]•[dR](T)[sP]•[dR](C)[sP]• |
| | [LR](T)[sP]•[dR](T)[sP]•[LR]([5meC])[sP]•[LR]([5meC]) |
| 1122_254 | [LR](A)[sP]•[LR](A)[sP]•[dR](T)[sP]•[LR]([5meC])[sP]•[dR](T)[sP]• |
| | [dR](T)[sP]•[fR](A)[sP]•[dR](T)[sP]•[dR](T)[sP]•[dR](T)[sP]• |
| | [dR](A)[sP]•[dR](C)[sP]•[dR](A)[sP]•[dR](T)[sP]•[dR](C)[sP]• |
| | [LR](T)[sP]•[dR](T)[sP]•[LR]([5meC])[sP]•[LR]([5meC]) |
| 1122_255 | [LR](A)[sP]•[LR](A)[sP]•[dR](T)[sP]•[LR]([5meC])[sP]•[dR](T)[sP]• |
| | [dR](T)[sP]•[LR](A)[sP]•[dR](T)[sP]•[dR](T)[sP]•[dR](T)[sP]• |
| | [dR](A)[sP]•[dR](C)[sP]•[dR](A)[sP]•[dR](T)[sP]•[fR](C)[sP]• |
| | [LR](T)[sP]•[dR](T)[sP]•[LR]([5meC])[sP]•[LR]([5meC]) |
| 1122_256 | [LR](A)[sP]•[LR](A)[sP]•[dR](T)[sP]•[LR]([5meC])[sP]•[dR](T)[sP]• |
| | [dR](T)[sP]•[LR](A)[sP]•[dR](T)[sP]•[dR](T)[sP]•[dR](T)[sP]• |
| | [dR](A)[sP]•[dR](C)[sP]•[fR](A)[sP]•[dR](T)[sP]•[dR](C)[sP]• |
| | [LR](T)[sP]•[dR](T)[sP]•[LR]([5meC])[sP]•[LR]([5meC]) |
| 1122_257 | [LR](A)[sP]•[LR](A)[sP]•[dR](T)[sP]•[LR]([5meC])[sP]•[dR](T)[sP]• |
| | [dR](T)[sP]•[LR](A)[sP]•[dR](T)[sP]•[dR](T)[sP]•[dR](T)[sP]• |
| | [dR](A)[sP]•[fR](C)[sP]•[dR](A)[sP]•[dR](T)[sP]•[dR](C)[sP]• |
| | [LR](T)[sP]•[dR](T)[sP]•[LR]([5meC])[sP]•[LR]([5meC]) |
| 1122_258 | [LR](A)[sP]•[LR](A)[sP]•[dR](T)[sP]•[LR]([5meC])[sP]•[dR](T)[sP]• |
| | [dR](T)[sP]•[LR](A)[sP]•[dR](T)[sP]•[dR](T)[sP]•[dR](T)[sP]• |
| | [fR](A)[sP]•[dR](C)[sP]•[dR](A)[sP]•[dR](T)[sP]•[dR](C)[sP]• |
| | [LR](T)[sP]•[dR](T)[sP]•[LR]([5meC])[sP]•[LR]([5meC]) |
| 1122_259 | [LR](A)[sP]•[LR](A)[sP]•[dR](T)[sP]•[LR]([5meC])[sP]•[dR](T)[sP]• |
| | [dR](T)[sP]•[LR](A)[sP]•[dR](T)[sP]•[dR](T)[sP]•[dR](T)[sP]• |
| | [dR](A)[sP]•[dR](C)[sP]•[dR](A)[sP]•[dR](T)[sP]•[dR](C)[sP]• |
| | [LR](T)[sP]•[LR](T)[sP]•[LR]([5meC])[sP]•[LR]([5meC]) |
| 1122_260 | [LR](A)[sP]•[LR](A)[sP]•[dR](T)[sP]•[LR]([5meC])[sP]•[dR](T)[sP]• |
| | [dR](T)[sP]•[LR](A)[sP]•[dR](T)[sP]•[dR](T)[sP]•[dR](T)[sP]• |
| | [dR](A)[sP]•[dR](C)[sP]•[dR](A)[sP]•[LR](T)[sP]•[dR](C)[sP]• |
| | [LR](T)[sP]•[dR](T)[sP]•[LR]([5meC])[sP]•[LR]([5meC]) |
| 1122_261 | [LR](A)[sP]•[LR](A)[sP]•[dR](T)[sP]•[LR]([5meC])[sP]•[dR](T)[sP]• |
| | [dR](T)[sP]•[LR](A)[sP]•[dR](T)[sP]•[dR](T)[sP]•[dR](T)[sP]• |
| | [dR](A)[sP]•[dR](C)[sP]•[LR](A)[sP]•[dR](T)[sP]•[dR](C)[sP]• |
| | [LR](T)[sP]•[dR](T)[sP]•[LR]([5meC])[sP]•[LR]([5meC]) |
| 1122_262 | [LR](A)[sP]•[LR](A)[sP]•[dR](T)[sP]•[LR]([5meC])[sP]•[dR](T)[sP]• |
| | [dR](T)[sP]•[LR](A)[sP]•[dR](T)[sP]•[dR](T)[sP]•[dR](T)[sP]• |
| | [LR](A)[sP]•[dR](C)[sP]•[dR](A)[sP]•[dR](T)[sP]•[dR](C)[sP]• |
| | [LR](T)[sP]•[dR](T)[sP]•[LR]([5meC])[sP]•[LR]([5meC]) |
| 1122_263 | [LR](A)[sP]•[LR](A)[sP]•[dR](T)[sP]•[LR]([5meC])[sP]•[dR](T)[sP]• |
| | [dR](T)[sP]•[LR](A)[sP]•[dR](T)[sP]•[dR](T)[sP]•[LR](T)[sP]• |
| | [dR](A)[sP]•[dR](C)[sP]•[dR](A)[sP]•[dR](T)[sP]•[dR](C)[sP]• |
| | [LR](T)[sP]•[dR](T)[sP]•[LR]([5meC])[sP]•[LR]([5meC]) |
| 1122_264 | [LR](A)[sP]•[LR](A)[sP]•[dR](T)[sP]•[LR]([5meC])[sP]•[dR](T)[sP]• |
| | [dR](T)[sP]•[LR](A)[sP]•[dR](T)[sP]•[LR](T)[sP]•[dR](T)[sP]• |
| | [dR](A)[sP]•[dR](C)[sP]•[dR](A)[sP]•[dR](T)[sP]•[dR](C)[sP]• |
| | [LR](T)[sP]•[dR](T)[sP]•[LR]([5meC])[sP]•[LR]([5meC]) |
| 1122_265 | [LR](A)[sP]•[LR](A)[sP]•[dR](T)[sP]•[LR]([5meC])[sP]•[dR](T)[sP]• |
| | [dR](T)[sP]•[LR](A)[sP]•[LR](T)[sP]•[dR](T)[sP]•[dR](T)[sP]• |
| | [dR](A)[sP]•[dR](C)[sP]•[dR](A)[sP]•[dR](T)[sP]•[dR](C)[sP]• |
| | [LR](T)[sP]•[dR](T)[sP]•[LR]([5meC])[sP]•[LR]([5meC]) |
| 1122_266 | [LR](A)[sP]•[LR](A)[sP]•[dR](T)[sP]•[LR]([5meC])[sP]•[dR](T)[sP]• |
| | [LR](T)[sP]•[LR](A)[sP]•[dR](T)[sP]•[dR](T)[sP]•[dR](T)[sP]• |
| | [dR](A)[sP]•[dR](C)[sP]•[dR](A)[sP]•[dR](T)[sP]•[dR](C)[sP]• |
| | [LR](T)[sP]•[dR](T)[sP]•[LR]([5meC])[sP]•[LR]([5meC]) |
| 1122_267 | [LR](A)[sP]•[LR](A)[sP]•[dR](T)[sP]•[LR]([5meC])[sP]•[LR](T)[sP]• |
| | [dR](T)[sP]•[LR](A)[sP]•[dR](T)[sP]•[dR](T)[sP]•[dR](T)[sP]• |
| | [dR](A)[sP]•[dR](C)[sP]•[dR](A)[sP]•[dR](T)[sP]•[dR](C)[sP]• |
| | [LR](T)[sP]•[dR](T)[sP]•[LR]([5meC])[sP]•[LR]([5meC]) |
| 1122_268 | [LR](A)[sP]•[LR](A)[sP]•[dR](T)[sP]•[LR]([5meC])[sP]•[dR](T)[sP]• |
| | [dR](T)[sP]•[LR](A)[sP]•[dR](T)[sP]•[dR](T)[sP]•[dR](T)[sP]• |
| | [dR](A)[sP]•[dR](C)[sP]•[dR](A)[sP]•[dR](T)[sP]•[dR](C)[sP]• |
| | [LR](T)[sP]•[dR](T)[sP]•[MOE]([5meC])[sP]•[LR]([5meC]) |
| 1122_269 | [LR](A)[sP]•[LR](A)[sP]•[dR](T)[sP]•[LR]([5meC])[sP]•[dR](T)[sP]• |
| | [dR](T)[sP]•[LR](A)[sP]•[dR](T)[sP]•[dR](T)[sP]•[dR](T)[sP]• |
| | [dR](A)[sP]•[dR](C)[sP]•[dR](A)[sP]•[dR](T)[sP]•[dR](C)[sP]• |
| | [LR](T)[sP]•[MOE](T)[sP]•[LR]([5meC])[sP]•[LR]([5meC]) |
| 1122_270 | [LR](A)[sP]•[LR](A)[sP]•[dR](T)[sP]•[LR]([5meC])[sP]•[dR](T)[sP]• |
| | [dR](T)[sP]•[LR](A)[sP]•[dR](T)[sP]•[dR](T)[sP]•[dR](T)[sP]• |
| | [dR](A)[sP]•[dR](C)[sP]•[dR](A)[sP]•[dR](T)[sP]•[dR](C)[sP]• |
| | [MOE](T)[sP]•[dR](T)[sP]•[LR]([5meC])[sP]•[LR]([5meC]) |
| 1122_271 | [LR](A)[sP]•[LR](A)[sP]•[dR](T)[sP]•[LR]([5meC])[sP]•[dR](T)[sP]• |
| | [dR](T)[sP]•[LR](A)[sP]•[dR](T)[sP]•[dR](T)[sP]•[dR](T)[sP]• |
| | [dR](A)[sP]•[dR](C)[sP]•[dR](A)[sP]•[MOE](T)[sP]•[dR](C)[sP]• |
| | [LR](T)[sP]•[dR](T)[sP]•[LR]([5meC])[sP]•[LR]([5meC]) |
| 1122_272 | [LR](A)[sP]•[LR](A)[sP]•[dR](T)[sP]•[LR]([5meC])[sP]•[dR](T)[sP]• |
| | [dR](T)[sP]•[LR](A)[sP]•[dR](T)[sP]•[dR](T)[sP]•[dR](T)[sP]• |
| | [dR](A)[sP]•[dR](C)[sP]•[MOE](A)[sP]•[dR](T)[sP]•[dR](C)[sP]• |
| | [LR](T)[sP]•[dR](T)[sP]•[LR]([5meC])[sP]•[LR]([5meC]) |
| 1122_273 | [LR](A)[sP]•[LR](A)[sP]•[dR](T)[sP]•[LR]([5meC])[sP]•[dR](T)[sP]• |
| | [dR](T)[sP]•[LR](A)[sP]•[dR](T)[sP]•[dR](T)[sP]•[dR](T)[sP]• |
| | [MOE](A)[sP]•[dR](C)[sP]•[dR](A)[sP]•[dR](T)[sP]•[dR](C)[sP]• |
| | [LR](T)[sP]•[dR](T)[sP]•[LR]([5meC])[sP]•[LR]([5meC]) |
| 1122_274 | [LR](A)[sP]•[LR](A)[sP]•[dR](T)[sP]•[LR]([5meC])[sP]•[dR](T)[sP]• |
| | [dR](T)[sP]•[LR](A)[sP]•[dR](T)[sP]•[dR](T)[sP]•[MOE](T)[sP]• |
| | [dR](A)[sP]•[dR](C)[sP]•[dR](A)[sP]•[dR](T)[sP]•[dR](C)[sP]• |
| | [LR](T)[sP]•[dR](T)[sP]•[LR]([5meC])[sP]•[LR]([5meC]) |
| 1122_275 | [LR](A)[sP]•[LR](A)[sP]•[dR](T)[sP]•[LR]([5meC])[sP]•[dR](T)[sP]• |
| | [dR](T)[sP]•[LR](A)[sP]•[dR](T)[sP]•[MOE](T)[sP]•[dR](T)[sP]• |
| | [dR](A)[sP]•[dR](C)[sP]•[dR](A)[sP]•[dR](T)[sP]•[dR](C)[sP]• |
| | [LR](T)[sP]•[dR](T)[sP]•[LR]([5meC])[sP]•[LR]([5meC]) |
| 1122_276 | [LR](A)[sP]•[LR](A)[sP]•[dR](T)[sP]•[LR]([5meC])[sP]•[dR](T)[sP]• |
| | [dR](T)[sP]•[LR](A)[sP]•[MOE](T)[sP]•[dR](T)[sP]•[dR](T)[sP]• |
| | [dR](A)[sP]•[dR](C)[sP]•[dR](A)[sP]•[dR](T)[sP]•[dR](C)[sP]• |
| | [LR](T)[sP]•[dR](T)[sP]•[LR]([5meC])[sP]•[LR]([5meC]) |
| 1122_277 | [LR](A)[sP]•[LR](A)[sP]•[dR](T)[sP]•[LR]([5meC])[sP]•[dR](T)[sP]• |
| | [dR](T)[sP]•[MOE](A)[sP]•[dR](T)[sP]•[dR](T)[sP]•[dR](T)[sP]• |
| | [dR](A)[sP]•[dR](C)[sP]•[dR](A)[sP]•[dR](T)[sP]•[dR](C)[sP]• |
| | [LR](T)[sP]•[dR](T)[sP]•[LR]([5meC])[sP]•[LR]([5meC]) |
| 1122_278 | [LR](A)[sP]•[LR](A)[sP]•[dR](T)[sP]•[LR]([5meC])[sP]•[dR](T)[sP]• |
| | [MOE](T)[sP]•[LR](A)[sP]•[dR](T)[sP]•[dR](T)[sP]•[dR](T)[sP]• |
| | [dR](A)[sP]•[dR](C)[sP]•[dR](A)[sP]•[dR](T)[sP]•[dR](C)[sP]• |
| | [LR](T)[sP]•[dR](T)[sP]•[LR]([5meC])[sP]•[LR]([5meC]) |
| 1122_279 | [LR](A)[sP]•[LR](A)[sP]•[dR](T)[sP]•[LR]([5meC])[sP]•[MOE](T)[sP]• |
| | [dR](T)[sP]•[LR](A)[sP]•[dR](T)[sP]•[dR](T)[sP]•[dR](T)[sP]• |
| | [dR](A)[sP]•[dR](C)[sP]•[dR](A)[sP]•[dR](T)[sP]•[dR](C)[sP]• |
| | [LR](T)[sP]•[dR](T)[sP]•[LR]([5meC])[sP]•[LR]([5meC]) |
| 1122_280 | [LR](A)[sP]•[LR](A)[sP]•[dR](T)[sP]•[MOE]([5meC])[sP]•[dR](T)[sP]• |
| | [dR](T)[sP]•[LR](A)[sP]•[dR](T)[sP]•[dR](T)[sP]•[dR](T)[sP]• |
| | [dR](A)[sP]•[dR](C)[sP]•[dR](A)[sP]•[dR](T)[sP]•[dR](C)[sP]• |
| | [LR](T)[sP]•[dR](T)[sP]•[LR]([5meC])[sP]•[LR]([5meC]) |
| 1122_281 | [LR](A)[sP]•[LR](A)[sP]•[MOE](T)[sP]•[LR]([5meC])[sP]•[dR](T)[sP]• |
| | [dR](T)[sP]•[LR](A)[sP]•[dR](T)[sP]•[dR](T)[sP]•[dR](T)[sP]• |
| | [dR](A)[sP]•[dR](C)[sP]•[dR](A)[sP]•[dR](T)[sP]•[dR](C)[sP]• |
| | [LR](T)[sP]•[dR](T)[sP]•[LR]([5meC])[sP]•[LR]([5meC]) |
| 1122_282 | [LR](A)[sP]•[MOE](A)[sP]•[dR](T)[sP]•[LR]([5meC])[sP]•[dR](T)[sP]• |
| | [dR](T)[sP]•[LR](A)[sP]•[dR](T)[sP]•[dR](T)[sP]•[dR](T)[sP]• |
| | [dR](A)[sP]•[dR](C)[sP]•[dR](A)[sP]•[dR](T)[sP]•[dR](C)[sP]• |
| | [LR](T)[sP]•[dR](T)[sP]•[LR]([5meC])[sP]•[LR]([5meC]) |
| 1122_283 | [LR](A)[sP]•[LR](A)[sP]•[dR](T)[sP]•[LR]([5meC])[sP]•[dR](T)[sP]• |
| | [dR](T)[sP]•[LR](A)[sP]•[dR](T)[sP]•[dR](T)[sP]•[dR](T)[sP]• |
| | [dR](A)[sP]•[dR](C)[sP]•[dR](A)[sP]•[dR](T)[sP]•[mR](C)[sP]• |
| | [LR](T)[sP]•[dR](T)[sP]•[LR]([5meC])[sP]•[LR]([5meC]) |
| 1122_284 | [LR](A)[sP]•[LR](A)[sP]•[dR](T)[sP]•[LR]([5meC])[sP]•[dR](T)[sP]• |
| | [dR](T)[sP]•[LR](A)[sP]•[dR](T)[sP]•[dR](T)[sP]•[dR](T)[sP]• |
| | [dR](A)[sP]•[dR](C)[sP]•[mR](A)[sP]•[dR](T)[sP]•[dR](C)[sP]• |
| | [LR](T)[sP]•[dR](T)[sP]•[LR]([5meC])[sP]•[LR]([5meC]) |
| 1122_285 | [LR](A)[sP]•[LR](A)[sP]•[dR](T)[sP]•[LR]([5meC])[sP]•[dR](T)[sP]• |
| | [dR](T)[sP]•[LR](A)[sP]•[dR](T)[sP]•[dR](T)[sP]•[dR](T)[sP]• |
| | [dR](A)[sP]•[mR](C)[sP]•[dR](A)[sP]•[dR](T)[sP]•[dR](C)[sP]• |
| | [LR](T)[sP]•[dR](T)[sP]•[LR]([5meC])[sP]•[LR]([5meC]) |
| 1122_286 | [LR](A)[sP]•[LR](A)[sP]•[dR](T)[sP]•[LR]([5meC])[sP]•[dR](T)[sP]• |
| | [dR](T)[sP]•[LR](A)[sP]•[dR](T)[sP]•[dR](T)[sP]•[dR](T)[sP]• |
| | [mR](A)[sP]•[dR](C)[sP]•[dR](A)[sP]•[dR](T)[sP]•[dR](C)[sP]• |
| | [LR](T)[sP]•[dR](T)[sP]•[LR]([5meC])[sP]•[LR]([5meC]) |
| 1122_287 | [LR](A)[sP]•[LR](A)[sP]•[dR](T)[sP]•[LR]([5meC])[sP]•[dR](T)[sP]• |
| | [dR](T)[sP]•[mR](A)[sP]•[dR](T)[sP]•[dR](T)[sP]•[dR](T)[sP]• |
| | [dR](A)[sP]•[dR](C)[sP]•[dR](A)[sP]•[dR](T)[sP]•[dR](C)[sP]• |
| | [LR](T)[sP]•[dR](T)[sP]•[LR]([5meC])[sP]•[LR]([5meC]) |
| 1122_288 | [LR](A)[sP]•[mR](A)[sP]•[dR](T)[sP]•[LR]([5meC])[sP]•[dR](T)[sP]• |
| | [dR](T)[sP]•[LR](A)[sP]•[dR](T)[sP]•[dR](T)[sP]•[dR](T)[sP]• |
| | [dR](A)[sP]•[dR](C)[sP]•[dR](A)[sP]•[dR](T)[sP]•[dR](C)[sP]• |
| | [LR](T)[sP]•[dR](T)[sP]•[LR]([5meC])[sP]•[LR]([5meC]) |
| 1122_289 | [LR](A)[sP]•[LR](A)[sP]•[LR](T)[sP]•[fR](C)[sP]•[dR](T)[sP]• |
| | [dR](T)[sP]•[dR](A)[sP]•[dR](T)[sP]•[dR](T)[sP]•[dR](T)[sP]• |
| | [dR](A)[sP]•[dR](C)[sP]•[dR](A)[sP]•[dR](T)[sP]•[dR](C)[sP]• |
| | [LR](T)[sP]•[dR](T)[sP]•[LR]([5meC])[sP]•[LR]([5meC]) |
| 1122_290 | [LR](A)[sP]•[LR](A)[sP]•[LR](T)[sP]•[LR]([5meC])[sP]•[dR](T)[sP]• |
| | [dR](T)[sP]•[dR](A)[sP]•[dR](T)[sP]•[dR](T)[sP]•[dR](T)[sP]• |
| | [dR](A)[sP]•[dR](C)[sP]•[dR](A)[sP]•[dR](T)[sP]•[dR](C)[sP]• |
| | [LR](T)[sP]•[dR](T)[sP]•[fR](C)[sP]•[LR]([5meC]) |
| 1122_291 | [LR](A)[sP]•[LR](A)[sP]•[LR](T)[sP]•[LR]([5meC])[sP]•[dR](T)[sP]• |
| | [dR](T)[sP]•[dR](A)[sP]•[dR](T)[sP]•[dR](T)[sP]•[dR](T)[sP]• |
| | [dR](A)[sP]•[dR](C)[sP]•[dR](A)[sP]•[dR](T)[sP]•[dR](C)[sP]• |
| | [LR](T)[sP]•[dR](T)[sP]•[mR](C)[sP]•[LR]([5meC]) |
| 1122_292 | [LR](A)[sP]•[LR](A)[sP]•[LR](T)[sP]•[mR](C)[sP]•[dR](T)[sP]• |
| | [dR](T)[sP]•[dR](A)[sP]•[dR](T)[sP]•[dR](T)[sP]•[dR](T)[sP]• |
| | [dR](A)[sP]•[dR](C)[sP]•[dR](A)[sP]•[dR](T)[sP]•[dR](C)[sP]• |
| | [LR](T)[sP]•[dR](T)[sP]•[LR]([5meC])[sP]•[LR]([5meC]) |
| 1122_293 | [LR](A)[sP]•[dR](A)[sP]•[dR](T)[sP]•[fR](C)[sP]•[dR](T)[sP]• |
| | [LR](T)[sP]•[dR](A)[sP]•[dR](T)[sP]•[dR](T)[sP]•[dR](T)[sP]• |
| | [dR](A)[sP]•[dR](C)[sP]•[dR](A)[sP]•[dR](T)[sP]•[dR](C)[sP]• |
| | [dR](T)[sP]•[LR](T)[sP]•[LR]([5meC])[sP]•[LR]([5meC]) |
| 1122_294 | [LR](A)[sP]•[dR](A)[sP]•[dR](T)[sP]•[LR]([5meC])[sP]•[dR](T)[sP]• |
| | [LR](T)[sP]•[dR](A)[sP]•[dR](T)[sP]•[dR](T)[sP]•[dR](T)[sP]• |
| | [dR](A)[sP]•[dR](C)[sP]•[dR](A)[sP]•[dR](T)[sP]•[dR](C)[sP]• |
| | [dR](T)[sP]•[LR](T)[sP]•[fR](C)[sP]•[LR]([5meC]) |
| 1122_295 | [LR](A)[sP]•[dR](A)[sP]•[dR](T)[sP]•[LR]([5meC])[sP]•[dR](T)[sP]• |
| | [LR](T)[sP]•[dR](A)[sP]•[dR](T)[sP]•[dR](T)[sP]•[dR](T)[sP]• |
| | [dR](A)[sP]•[dR](C)[sP]•[dR](A)[sP]•[dR](T)[sP]•[dR](C)[sP]• |
| | [dR](T)[sP]•[LR](T)[sP]•[mR](C)[sP]•[LR]([5meC]) |
| 1122_296 | [LR](A)[sP]•[dR](A)[sP]•[dR](T)[sP]•[mR](C)[sP]•[dR](T)[sP]• |
| | [LR](T)[sP]•[dR](A)[sP]•[dR](T)[sP]•[dR](T)[sP]•[dR](T)[sP]• |
| | [dR](A)[sP]•[dR](C)[sP]•[dR](A)[sP]•[dR](T)[sP]•[dR](C)[sP]• |
| | [dR](T)[sP]•[LR](T)[sP]•[LR]([5meC])[sP]•[LR]([5meC]) |
| 1122_297 | [LR](A)[sP]•[LR](A)[sP]•[dR](T)[sP]•[fR](C)[sP]•[dR](T)[sP]• |
| | [dR](T)[sP]•[LR](A)[sP]•[dR](T)[sP]•[dR](T)[sP]•[dR](T)[sP]• |
| | [dR](A)[sP]•[dR](C)[sP]•[dR](A)[sP]•[dR](T)[sP]•[dR](C)[sP]• |
| | [LR](T)[sP]•[dR](T)[sP]•[LR]([5meC])[sP]•[LR]([5meC]) |
| 1122_298 | [LR](A)[sP]•[LR](A)[sP]•[dR](T)[sP]•[LR]([5meC])[sP]•[dR](T)[sP]• |
| | [dR](T)[sP]•[LR](A)[sP]•[dR](T)[sP]•[dR](T)[sP]•[dR](T)[sP]• |
| | [dR](A)[sP]•[dR](C)[sP]•[dR](A)[sP]•[dR](T)[sP]•[dR](C)[sP]• |
| | [LR](T)[sP]•[dR](T)[sP]•[fR](C)[sP]•[LR]([5meC]) |
| 1122_299 | [LR](A)[sP]•[LR](A)[sP]•[dR](T)[sP]•[LR]([5meC])[sP]•[dR](T)[sP]• |
| | [dR](T)[sP]•[LR](A)[sP]•[dR](T)[sP]•[dR](T)[sP]•[dR](T)[sP]• |
| | [dR](A)[sP]•[dR](C)[sP]•[dR](A)[sP]•[dR](T)[sP]•[dR](C)[sP]• |
| | [LR](T)[sP]•[dR](T)[sP]•[mR](C)[sP]•[LR]([5meC]) |
| 1122_300 | [LR](A)[sP]•[LR](A)[sP]•[dR](T)[sP]•[mR](C)[sP]•[dR](T)[sP]• |
| | [dR](T)[sP]•[LR](A)[sP]•[dR](T)[sP]•[dR](T)[sP]•[dR](T)[sP]• |
| | [dR](A)[sP]•[dR](C)[sP]•[dR](A)[sP]•[dR](T)[sP]•[dR](C)[sP]• |
| | [LR](T)[sP]•[dR](T)[sP]•[LR]([5meC])[sP]•[LR]([5meC]) |
| 1122_301 | [LR](A)[sP]•[dR](A)[sP]•[dR](T)[sP]•[LR]([5meC])[sP]•[dR](T)[sP]• |
| | [LR](T)[sP]•[dR](A)[sP]•[dR](T)[sP]•[dR](T)[sP]•[dR](T)[sP]• |
| | [dR](A)[sP]•[fR](C)[sP]•[dR](A)[sP]•[dR](T)[sP]•[dR](C)[sP]• |
| | [dR](T)[sP]•[LR](T)[sP]•[LR]([5meC])[sP]•[LR]([5meC]) |
| 1122_302 | [LR](A)[sP]•[dR](A)[sP]•[dR](T)[sP]•[LR]([5meC])[sP]•[dR](T)[sP]• |
| | [LR](T)[sP]•[dR](A)[sP]•[dR](T)[sP]•[dR](T)[sP]•[dR](T)[sP]• |
| | [fR](A)[sP]•[dR](C)[sP]•[dR](A)[sP]•[dR](T)[sP]•[dR](C)[sP]• |
| | [dR](T)[sP]•[LR](T)[sP]•[LR]([5meC])[sP]•[LR]([5meC]) |
| 1122_303 | [LR](A)[sP]•[dR](A)[sP]•[dR](T)[sP]•[LR]([5meC])[sP]•[dR](T)[sP]• |
| | [LR](T)[sP]•[fR](A)[sP]•[dR](T)[sP]•[dR](T)[sP]•[dR](T)[sP]• |
| | [dR](A)[sP]•[dR](C)[sP]•[dR](A)[sP]•[dR](T)[sP]•[dR](C)[sP]• |
| | [dR](T)[sP]•[LR](T)[sP]•[LR]([5meC])[sP]•[LR]([5meC]) |
| 1122_304 | [LR](A)[sP]•[dR](A)[sP]•[dR](T)[sP]•[LR]([5meC])[sP]•[dR](T)[sP]• |
| | [LR](T)[sP]•[dR](A)[sP]•[dR](T)[sP]•[dR](T)[sP]•[dR](T)[sP]• |
| | [dR](A)[sP]•[dR](C)[sP]•[dR](A)[sP]•[dR](T)[sP]•[dR](C)[sP]• |
| | [LR](T)[sP]•[LR](T)[sP]•[LR]([5meC])[sP]•[LR]([5meC]) |
| 1122_305 | [LR](A)[sP]•[dR](A)[sP]•[dR](T)[sP]•[LR]([5meC])[sP]•[dR](T)[sP]• |
| | [LR](T)[sP]•[dR](A)[sP]•[dR](T)[sP]•[dR](T)[sP]•[dR](T)[sP]• |
| | [dR](A)[sP]•[dR](C)[sP]•[dR](A)[sP]•[LR](T)[sP]•[dR](C)[sP]• |
| | [dR](T)[sP]•[LR](T)[sP]•[LR]([5meC])[sP]•[LR]([5meC]) |
| 1122_306 | [LR](A)[sP]•[dR](A)[sP]•[dR](T)[sP]•[LR]([5meC])[sP]•[dR](T)[sP]• |
| | [LR](T)[sP]•[dR](A)[sP]•[dR](T)[sP]•[dR](T)[sP]•[dR](T)[sP]• |
| | [dR](A)[sP]•[dR](C)[sP]•[LR](A)[sP]•[dR](T)[sP]•[dR](C)[sP]• |
| | [dR](T)[sP]•[LR](T)[sP]•[LR]([5meC])[sP]•[LR]([5meC]) |
| 1122_307 | [LR](A)[sP]•[dR](A)[sP]•[dR](T)[sP]•[LR]([5meC])[sP]•[dR](T)[sP]• |
| | [LR](T)[sP]•[dR](A)[sP]•[dR](T)[sP]•[dR](T)[sP]•[dR](T)[sP]• |
| | [LR](A)[sP]•[dR](C)[sP]•[dR](A)[sP]•[dR](T)[sP]•[dR](C)[sP]• |
| | [dR](T)[sP]•[LR](T)[sP]•[LR]([5meC])[sP]•[LR]([5meC]) |
| 1122_308 | [LR](A)[sP]•[fR](A)[sP]•[fR](U)[sP]•[LR]([5meC])[sP]•[dR](T)[sP]• |
| | [LR](T)[sP]•[dR](A)[sP]•[dR](T)[sP]•[dR](T)[sP]•[dR](T)[sP]• |
| | [dR](A)[sP]•[dR](C)[sP]•[dR](A)[sP]•[dR](T)[sP]•[dR](C)[sP]• |
| | [LR](T)[sP]•[dR](T)[sP]•[LR]([5meC])[sP]•[LR]([5meC]) |
| 1122_309 | [LR](A)[sP]•[LR](A)[sP]•[fR](U)[sP]•[LR]([5meC])[sP]•[dR](T)[sP]• |
| | [dR](T)[sP]•[dR](A)[sP]•[dR](T)[sP]•[dR](T)[sP]•[dR](T)[sP]• |
| | [dR](A)[sP]•[dR](C)[sP]•[dR](A)[sP]•[dR](T)[sP]•[dR](C)[sP]• |
| | [LR](T)[sP]•[dR](T)[sP]•[LR]([5meC])[sP]•[LR]([5meC]) |
| 1122_310 | [LR](A)[sP]•[LR](A)[sP]•[LR](T)[sP]•[LR]([5meC])[sP]•[dR](T)[sP]• |
| | [dR](T)[sP]•[dR](A)[sP]•[dR](T)[sP]•[dR](T)[sP]•[dR](T)[sP]• |
| | [dR](A)[sP]•[dR](C)[sP]•[dR](A)[sP]•[dR](T)[sP]•[dR](C)[sP]• |
| | [fR](U)[sP]•[dR](T)[sP]•[LR]([5meC])[sP]•[LR]([5meC]) |
| 1122_311 | [LR](A)[sP]•[LR](A)[sP]•[LR](T)[sP]•[LR]([5meC])[sP]•[dR](T)[sP]• |
| | [dR](T)[sP]•[dR](A)[sP]•[dR](T)[sP]•[dR](T)[sP]•[dR](T)[sP]• |
| | [dR](A)[sP]•[dR](C)[sP]•[dR](A)[sP]•[dR](T)[sP]•[dR](C)[sP]• |
| | [LR](T)[sP]•[fR](U)[sP]•[LR]([5meC])[sP]•[LR]([5meC]) |
| 1122_312 | [LR](A)[sP]•[LR](A)[sP]•[LR](T)[sP]•[LR]([5meC])[sP]•[dR](T)[sP]• |
| | [dR](T)[sP]•[dR](A)[sP]•[dR](T)[sP]•[dR](T)[sP]•[fR](U)[sP]• |
| | [dR](A)[sP]•[dR](C)[sP]•[dR](A)[sP]•[dR](T)[sP]•[dR](C)[sP]• |
| | [LR](T)[sP]•[dR](T)[sP]•[LR]([5meC])[sP]•[LR]([5meC]) |
| 1122_313 | [LR](A)[sP]•[LR](A)[sP]•[LR](T)[sP]•[LR]([5meC])[sP]•[dR](T)[sP]• |
| | [dR](T)[sP]•[dR](A)[sP]•[dR](T)[sP]•[fR](U)[sP]•[dR](T)[sP]• |
| | [dR](A)[sP]•[dR](C)[sP]•[dR](A)[sP]•[dR](T)[sP]•[dR](C)[sP]• |
| | [LR](T)[sP]•[dR](T)[sP]•[LR]([5meC])[sP]•[LR]([5meC]) |
| 1122_314 | [LR](A)[sP]•[LR](A)[sP]•[LR](T)[sP]•[LR]([5meC])[sP]•[dR](T)[sP]• |
| | [dR](T)[sP]•[dR](A)[sP]•[fR](U)[sP]•[dR](T)[sP]•[dR](T)[sP]• |
| | [dR](A)[sP]•[dR](C)[sP]•[dR](A)[sP]•[dR](T)[sP]•[dR](C)[sP]• |
| | [LR](T)[sP]•[dR](T)[sP]•[LR]([5meC])[sP]•[LR]([5meC]) |
| 1122_315 | [LR](A)[sP]•[LR](A)[sP]•[LR](T)[sP]•[LR]([5meC])[sP]•[dR](T)[sP]• |
| | [fR](U)[sP]•[dR](A)[sP]•[dR](T)[sP]•[dR](T)[sP]•[dR](T)[sP]• |
| | [dR](A)[sP]•[dR](C)[sP]•[dR](A)[sP]•[dR](T)[sP]•[dR](C)[sP]• |
| | [LR](T)[sP]•[dR](T)[sP]•[LR]([5meC])[sP]•[LR]([5meC]) |
| 1122_316 | [LR](A)[sP]•[fR](A)[sP]•[fR](U)[sP]•[LR]([5meC])[sP]•[dR](T)[sP]• |
| | [LR](T)[sP]•[dR](A)[sP]•[dR](T)[sP]•[dR](T)[sP]•[dR](T)[sP]• |
| | [dR](A)[sP]•[dR](C)[sP]•[dR](A)[sP]•[dR](T)[sP]•[dR](C)[sP]• |
| | [dR](T)[sP]•[LR](T)[sP]•[LR]([5meC])[sP]•[LR]([5meC]) |
| 1122_317 | [LR](A)[sP]•[dR](A)[sP]•[dR](T)[sP]•[LR]([5meC])[sP]•[dR](T)[sP]• |
| | [fR](U)[sP]•[dR](A)[sP]•[dR](T)[sP]•[dR](T)[sP]•[dR](T)[sP]• |
| | [dR](A)[sP]•[dR](C)[sP]•[dR](A)[sP]•[dR](T)[sP]•[dR](C)[sP]• |
| | [dR](T)[sP]•[LR](T)[sP]•[LR]([5meC])[sP]•[LR]([5meC]) |
| 1122_318 | [LR](A)[sP]•[dR](A)[sP]•[dR](T)[sP]•[LR]([5meC])[sP]•[dR](T)[sP]• |
| | [LR](T)[sP]•[dR](A)[sP]•[dR](T)[sP]•[dR](T)[sP]•[dR](T)[sP]• |
| | [dR](A)[sP]•[dR](C)[sP]•[dR](A)[sP]•[dR](T)[sP]•[dR](C)[sP]• |
| | [dR](T)[sP]•[fR](U)[sP]•[LR]([5meC])[sP]•[LR]([5meC]) |
| 1122_319 | [LR](A)[sP]•[dR](A)[sP]•[dR](T)[sP]•[LR]([5meC])[sP]•[dR](T)[sP]• |
| | [LR](T)[sP]•[dR](A)[sP]•[dR](T)[sP]•[dR](T)[sP]•[dR](T)[sP]• |
| | [dR](A)[sP]•[dR](C)[sP]•[dR](A)[sP]•[dR](T)[sP]•[dR](C)[sP]• |
| | [fR](U)[sP]•[LR](T)[sP]•[LR]([5meC])[sP]•[LR]([5meC]) |
| 1122_320 | [LR](A)[sP]•[dR](A)[sP]•[dR](T)[sP]•[LR]([5meC])[sP]•[dR](T)[sP]• |
| | [LR](T)[sP]•[dR](A)[sP]•[dR](T)[sP]•[dR[(T)[sP]•[dR[(T)[sP]• |
| | [dR](A)[sP]•[dR](C)[sP]•[dR](A)[sP]•[fR](U)[sP]•[dR](C)[sP]• |
| | [dR](T)[sP]•[LR](T)[sP]•[LR]([5meC])[sP]•[LR]([5meC]) |
| 1122_321 | [LR](A)[sP]•[dR](A)[sP]•[dR](T)[sP]•[LR]([5meC])[sP]•[dR](T)[sP]• |
| | [LR](T)[sP]•[dR](A)[sP]•[dR](T)[sP]•[dR](T)[sP]•[fR](U)[sP]• |
| | [dR](A)[sP]•[dR](C)[sP]•[dR](A)[sP]•[dR](T)[sP]•[dR](C)[sP]• |
| | [dR](T)[sP]•[LR](T)[sP]•[LR]([5meC])[sP]•[LR]([5meC]) |
| 1122_322 | [LR](A)[sP]•[dR](A)[sP]•[dR](T)[sP]•[LR]([5meC])[sP]•[dR](T)[sP]• |
| | [LR](T)[sP]•[dR](A)[sP]•[dR](T)[sP]•[fR](U)[sP]•[dR](T)[sP]• |
| | [dR](A)[sP]•[dR](C)[sP]•[dR](A)[sP]•[dR](T)[sP]•[dR](C)[sP]• |
| | [dR](T)[sP]•[LR](T)[sP]•[LR]([5meC])[sP]•[LR]([5meC]) |
| 1122_323 | [LR](A)[sP]•[dR](A)[sP]•[dR](T)[sP]•[LR]([5meC])[sP]•[dR](T)[sP]• |
| | [LR](T)[sP]•[dR](A)[sP]•[fR](U)[sP]•[dR](T)[sP]•[dR](T)[sP]• |
| | [dR](A)[sP]•[dR](C)[sP]•[dR](A)[sP]•[dR](T)[sP]•[dR](C)[sP]• |
| | [dR](T)[sP]•[LR](T)[sP]•[LR]([5meC])[sP]•[LR]([5meC]) |
| 1122_324 | [LR](A)[sP]•[dR](A)[sP]•[dR](T)[sP]•[LR]([5meC])[sP]•[fR](U)[sP]• |
| | [LR](T)[sP]•[dR](A)[sP]•[dR](T)[sP]•[dR](T)[sP]•[dR](T)[sP]• |
| | [dR](A)[sP]•[dR](C)[sP]•[dR](A)[sP]•[dR](T)[sP]•[dR](C)[sP]• |
| | [dR](T)[sP]•[LR](T)[sP]•[LR]([5meC])[sP]•[LR]([5meC]) |
| 1122_325 | [LR](A)[sP]•[dR](A)[sP]•[fR](U)[sP]•[LR]([5meC])[sP]•[dR](T)[sP]• |
| | [LR](T)[sP]•[dR](A)[sP]•[dR](T)[sP]•[dR](T)[sP]•[dR](T)[sP]• |
| | [dR](A)[sP]•[dR](C)[sP]•[dR](A)[sP]•[dR](T)[sP]•[dR](C)[sP]• |
| | [dR](T)[sP]•[LR](T)[sP]•[LR]([5meC])[sP]•[LR]([5meC]) |
| 1122_326 | [LR](A)[sP]•[LR](A)[sP]•[dR](T)[sP]•[LR]([5meC])[sP]•[dR](T)[sP]• |
| | [dR](T)[sP]•[LR](A)[sP]•[dR](T)[sP]•[dR](T)[sP]•[dR](T)[sP]• |
| | [dR](A)[sP]•[dR](C)[sP]•[dR](A)[sP]•[dR](T)[sP]•[dR](C)[sP]• |
| | [fR](U)[sP]•[dR](T)[sP]•[LR]([5meC])[sP]•[LR]([5meC]) |
| 1122_327 | [LR](A)[sP]•[LR](A)[sP]•[dR](T)[sP]•[LR]([5meC])[sP]•[dR](T)[sP]• |
| | [dR](T)[sP]•[LR](A)[sP]•[dR](T)[sP]•[dR](T)[sP]•[dR](T)[sP]• |
| | [dR](A)[sP]•[dR](C)[sP]•[dR](A)[sP]•[dR](T)[sP]•[dR](C)[sP]• |
| | [LR](T)[sP]•[fR](U)[sP]•[LR]([5meC])[sP]•[LR]([5meC]) |
| 1122_328 | [LR](A)[sP]•[LR](A)[sP]•[dR](T)[sP]•[LR]([5meC])[sP]•[dR](T)[sP]• |
| | [dR](T)[sP]•[LR](A)[sP]•[dR](T)[sP]•[dR](T)[sP]•[dR](T)[sP]• |
| | [dR](A)[sP]•[dR](C)[sP]•[dR](A)[sP]•[fR](U)[sP]•[dR](C)[sP]• |
| | [LR](T)[sP]•[dR](T)[sP]•[LR]([5meC])[sP]•[LR]([5meC]) |
| 1122_329 | [LR](A)[sP]•[LR](A)[sP]•[dR](T)[sP]•[LR]([5meC])[sP]•[dR](T)[sP]• |
| | [dR](T)[sP]•[LR](A)[sP]•[dR](T)[sP]•[dR](T)[sP]•[fR](U)[sP]• |
| | [dR](A)[sP]•[dR](C)[sP]•[dR](A)[sP]•[dR](T)[sP]•[dR](C)[sP]• |
| | [LR](T)[sP]•[dR](T)[sP]•[LR]([5meC])[sP]•[LR]([5meC]) |
| 1122_330 | [LR](A)[sP]•[LR](A)[sP]•[dR](T)[sP]•[LR]([5meC])[sP]•[dR](T)[sP]• |
| | [dR](T)[sP]•[LR](A)[sP]•[dR](T)[sP]•[fR](U)[sP]•[dR](T)[sP]• |
| | [dR](A)[sP]•[dR](C)[sP]•[dR](A)[sP]•[dR](T)[sP]•[dR](C)[sP]• |
| | [LR](T)[sP]•[dR](T)[sP]•[LR]([5meC])[sP]•[LR]([5meC]) |
| 1122_331 | [LR](A)[sP]•[LR](A)[sP]•[dR](T)[sP]•[LR]([5meC])[sP]•[dR](T)[sP]• |
| | [dR](T)[sP]•[LR](A)[sP]•[fR](U)[sP]•[dR](T)[sP]•[dR](T)[sP]• |
| | [dR](A)[sP]•[dR](C)[sP]•[dR](A)[sP]•[dR](T)[sP]•[dR](C)[sP]• |
| | [LR](T)[sP]•[dR](T)[sP]•[LR]([5meC])[sP]•[LR]([5meC]) |
| 1122_332 | [LR](A)[sP]•[LR](A)[sP]•[dR](T)[sP]•[LR]([5meC])[sP]•[dR](T)[sP]• |
| | [fR](U)[sP]•[LR](A)[sP]•[dR](T)[sP]•[dR](T)[sP]•[dR](T)[sP]• |
| | [dR](A)[sP]•[dR](C)[sP]•[dR](A)[sP]•[dR](T)[sP]•[dR](C)[sP]• |
| | [LR](T)[sP]•[dR](T)[sP]•[LR]([5meC])[sP]•[LR]([5meC]) |
| 1122_333 | [LR](A)[sP]•[LR](A)[sP]•[dR](T)[sP]•[LR]([5meC])[sP]•[fR](U)[sP]• |
| | [dR](T)[sP]•[LR](A)[sP]•[dR](T)[sP]•[dR](T)[sP]•[dR](T)[sP]• |
| | [dR](A)[sP]•[dR](C)[sP]•[dR](A)[sP]•[dR](T)[sP]•[dR](C)[sP]• |
| | [LR](T)[sP]•[dR](T)[sP]•[LR]([5meC])[sP]•[LR]([5meC]) |
| 1122_334 | [LR](A)[sP]•[LR](A)[sP]•[fR](U)[sP]•[LR]([5meC])[sP]•[dR](T)[sP]• |
| | [dR](T)[sP]•[LR](A)[sP]•[dR](T)[sP]•[dR](T)[sP]•[dR](T)[sP]• |
| | [dR](A)[sP]•[dR](C)[sP]•[dR](A)[sP]•[dR](T)[sP]•[dR](C)[sP]• |
| | [LR](T)[sP]•[dR](T)[sP]•[LR]([5meC])[sP]•[LR]([5meC]) |
| 1122_335 | [LR](A)[sP]•[LR](A)[sP]•[LR](T)[sP]•[LR]([5meC])[sP]•[fR](U)[sP]• |
| | [dR](T)[sP]•[dR](A)[sP]•[dR](T)[sP]•[dR](T)[sP]•[dR](T)[sP]• |
| | [dR](A)[sP]•[dR](C)[sP]•[dR](A)[sP]•[dR](T)[sP]•[dR](C)[sP]• |
| | [LR](T)[sP]•[dR](T)[sP]•[LR]([5meC])[sP]•[LR]([5meC]) |
| 1122_336 | [LR](A)[sP]•[LR](A)[sP]•[LR](T)[sP]•[LR]([5meC])[sP]•[dR](T)[sP]• |
| | [dR](T)[sP]•[dR](A)[sP]•[dR](T)[sP]•[dR](T)[sP]•[dR](T)[sP]• |
| | [dR](A)[sP]•[dR](C)[sP]•[dR](A)[sP]•[fR](U)[sP]•[dR](C)[sP]• |
| | [LR](T)[sP]•[dR](T)[sP]•[LR]([5meC])[sP]•[LR]([5meC]) |
| 1122_337 | [LR](A)[sP]•[LR](A)[sP]•[LR](T)[sP]•[LR]([5meC])[sP]•[dR](T)[sP]• |
| | [dR](T)[sP]•[dR](A)[sP]•[dR](T)[MOPO]•[dR](T)[sP]•[dR](T)[sP]• |
| | [dR](A)[sP]•[dR](C)[sP]•[dR](A)[sP]•[dR](T)[sP]•[dR](C)[sP]• |
| | [LR](T)[sP]•[dR](T)[sP]•[LR]([5meC])[sP]•[LR]([5meC]) |
| 1122_338 | [LR](A)[sP]•[LR](A)[sP]•[LR](T)[sP]•[LR]([5meC])[sP]•[dR](T)[sP]• |
| | [dR](T)[sP]•[dR](A)[sP]•[dR](T)[sP]•[dR](T)[MOPO]•[dR](T)[sP]• |
| | [dR](A)[sP]•[dR](C)[sP]•[dR](A)[sP]•[dR](T)[sP]•[dR](C)[sP]• |
| | [LR](T)[sP]•[dR](T)[sP]•[LR]([5meC])[sP]•[LR]([5meC]) |
| 1122_339 | [LR](A)[sP]•[LR](A)[sP]•[LR](T)[sP]•[LR]([5meC])[sP]•[dR](T)[sP]• |
| | [dR](T)[sP]•[dR](A)[sP]•[dR](T)[sP]•[dR](T)[sP]•[dR](T)[MOPO]• |
| | [dR](A)[sP]•[dR](C)[sP]•[dR](A)[sP]•[dR](T)[sP]•[dR](C)[sP]• |
| | [LR](T)[sP]•[dR](T)[sP]•[LR]([5meC])[sP]•[LR]([5meC]) |
| 1122_340 | [LR](A)[sP]•[LR](A)[sP]•[LR](T)[sP]•[LR]([5meC])[sP]•[dR](T)[sP]• |
| | [dR](T)[sP]•[dR](A)[sP]•[dR](T)[sP]•[dR](T)[sP]•[dR](T)[sP]• |
| | [dR](A)[MOPO]•[dR](C)[sP]•[dR](A)[sP]•[dR](T)[sP]•[dR](C)[sP]• |
| | [LR](T)[sP]•[dR](T)[sP]•[LR]([5meC])[sP]•[LR]([5meC]) |
| 1122_341 | [LR](A)[sP]•[LR](A)[sP]•[LR](T)[sP]•[LR]([5meC])[sP]•[dR](T)[sP]• |
| | [dR](T)[sP]•[dR](A)[sP]•[dR](T)[sP]•[dR](T)[sP]•[dR](T)[sP]• |
| | [dR](A)[sP]•[dR](C)[MOPO]•[dR](A)[sP]•[dR](T)[sP]•[dR](C)[sP]• |
| | [LR](T)[sP]•[dR](T)[sP]•[LR]([5meC])[sP]•[LR]([5meC]) |
| 1122_342 | [LR](A)[sP]•[LR](A)[sP]•[LR](T)[sP]•[LR]([5meC])[sP]•[dR](T)[sP]• |
| | [dR](T)[sP]•[dR](A)[sP]•[dR](T)[sP]•[dR](T)[sP]•[dR](T)[sP]• |
| | [dR](A)[sP]•[dR](C)[sP]•[dR](A)[MOPO]•[dR](T)[sP]•[dR](C)[sP]• |
| | [LR](T)[sP]•[dR](T)[sP]•[LR]([5meC])[sP]•[LR]([5meC]) |
| 1122_343 | [LR](A)[sP]•[LR](A)[sP]•[LR](T)[sP]•[LR]([5meC])[sP]•[dR](T)[sP]• |
| | [dR](T)[sP]•[dR](A)[sP]•[dR](T)[sP]•[dR](T)[sP]•[dR](T)[sP]• |
| | [dR](A)[sP]•[dR](C)[sP]•[dR](A)[sP]•[dR](T)[MOPO]•[dR](C)[sP]• |
| | [LR](T)[sP]•[dR](T)[sP]•[LR]([5meC])[sP]•[LR]([5meC]) |
| 1122_344 | [LR](A)[sP]•[LR](A)[sP]•[LR](T)[sP]•[LR]([5meC])[sP]•[dR](T)[sP]• |
| | [dR](T)[sP]•[dR](A)[sP]•[dR](T)[sP]•[dR](T)[sP]•[dR](T)[sP]• |
| | [dR](A)[sP]•[dR](C)[sP]•[dR](A)[sP]•[dR](T)[sP]•[dR](C)[MOPO]• |
| | [LR](T)[sP]•[dR](T)[sP]•[LR]([5meC])[sP]•[LR]([5meC]) |
| 1122_345 | [LR](A)[sP]•[LR](A)[sP]•[LR](T)[sP]•[LR]([5meC])[sP]•[dR](T)[MOPS]• |
| | [dR](T)[sP]•[dR](A)[sP]•[dR](T)[sP]•[dR](T)[sP]•[dR](T)[sP]• |
| | [dR](A)[sP]•[dR](C)[sP]•[dR](A)[sP]•[dR](T)[sP]•[dR](C)[sP]• |
| | [LR](T)[sP]•[dR](T)[sP]•[LR]([5meC])[sP]•[LR]([5meC]) |
| 1122_346 | [LR](A)[sP]•[LR](A)[sP]•[LR](T)[sP]•[LR]([5meC])[sP]•[dR](T)[sP]• |
| | [dR](T)[MOPS]•[dR](A)[sP]•[dR](T)[sP]•[dR](T)[sP]•[dR](T)[sP]• |
| | [dR](A)[sP]•[dR](C)[sP]•[dR](A)[sP]•[dR](T)[sP]•[dR](C)[sP]• |
| | [LR](T)[sP]•[dR](T)[sP]•[LR]([5meC])[sP]•[LR]([5meC]) |
| 1122_347 | [LR](A)[sP]•[LR](A)[sP]•[LR](T)[sP]•[LR]([5meC])[sP]•[dR](T)[sP]• |
| | [dR](T)[sP]•[dR](A)[MOPS]•[dR](T)[sP]•[dR](T)[sP]•[dR](T)[sP]• |
| | [dR](A)[sP]•[dR](C)[sP]•[dR](A)[sP]•[dR](T)[sP]•[dR](C)[sP]• |
| | [LR](T)[sP]•[dR](T)[sP]•[LR]([5meC])[sP]•[LR]([5meC]) |
| 1122_348 | [LR](A)[sP]•[LR](A)[sP]•[LR](T)[sP]•[LR]([5meC])[sP]•[dR](T)[sP]• |
| | [dR](T)[sP]•[dR](A)[sP]•[dR](T)[MOPS]•[dR](T)[sP]•[dR](T)[sP]• |
| | [dR](A)[sP]•[dR](C)[sP]•[dR](A)[sP]•[dR](T)[sP]•[dR](C)[sP]• |
| | [LR](T)[sP]•[dR](T)[sP]•[LR]([5meC])[sP]•[LR]([5meC]) |
| 1122_349 | [LR](A)[sP]•[LR](A)[sP]•[LR](T)[sP]•[LR]([5meC])[sP]•[dR](T)[sP]• |
| | [dR](T)[sP]•[dR](A)[sP]•[dR](T)[sP]•[dR](T)[MOPS]•[dR](T)[sP]• |
| | [dR](A)[sP]•[dR](C)[sP]•[dR](A)[sP]•[dR](T)[sP]•[dR](C)[sP]• |
| | [LR](T)[sP]•[dR](T)[sP]•[LR]([5meC])[sP]•[LR]([5meC]) |
| 1122_350 | [LR](A)[sP]•[LR](A)[sP]•[LR](T)[sP]•[LR]([5meC])[sP]•[dR](T)[sP]• |
| | [dR](T)[sP]•[dR](A)[sP]•[dR](T)[sP]•[dR](T)[sP]•[dR](T)[MOPS]• |
| | [dR](A)[sP]•[dR](C)[sP]•[dR](A)[sP]•[dR](T)[sP]•[dR](C)[sP]• |
| | [LR](T)[sP]•[dR](T)[sP]•[LR]([5meC])[sP]•[LR]([5meC]) |
| 1122_351 | [LR](A)[sP]•[LR](A)[sP]•[LR](T)[sP]•[LR]([5meC])[sP]•[dR](T)[sP]• |
| | [dR](T)[sP]•[dR](A)[sP]•[dR](T)[sP]•[dR](T)[sP]•[dR](T)[sP]• |
| | [dR](A)[MOPS]•[dR](C)[sP]•[dR](A)[sP]•[dR](T)[sP]•[dR](C)[sP]• |
| | [LR](T)[sP]•[dR](T)[sP]•[LR]([5meC])[sP]•[LR]([5meC]) |
| 1122_352 | [LR](A)[sP]•[LR](A)[sP]•[LR](T)[sP]•[LR]([5meC])[sP]•[dR](T)[sP]• |
| | [dR](T)[sP]•[dR](A)[sP]•[dR](T)[sP]•[dR](T)[sP]•[dR](T)[sP]• |
| | [dR](A)[sP]•[dR](C)[MOPS]•[dR](A)[sP]•[dR](T)[sP]•[dR](C)[sP]• |
| | [LR](T)[sP]•[dR](T)[sP]•[LR]([5meC])[sP]•[LR]([5meC]) |
| 1122_353 | [LR](A)[sP]•[LR](A)[sP]•[LR](T)[sP]•[LR]([5meC])[sP]•[dR](T)[MOPO]• |
| | [dR](T)[sP]•[dR](A)[sP]•[dR](T)[sP]•[dR](T)[sP]•[dR](T)[sP]• |
| | [dR](A)[sP]•[dR](C)[sP]•[dR](A)[sP]•[dR](T)[sP]•[dR](C)[sP]• |
| | [LR](T)[sP]•[dR](T)[sP]•[LR]([5meC])[sP]•[LR]([5meC]) |
| 1122_354 | [LR](A)[sP]•[LR](A)[sP]•[LR](T)[sP]•[LR]([5meC])[sP]•[dR](T)[sP]• |
| | [dR](T)[MOPO]•[dR](A)[sP]•[dR](T)[sP]•[dR](T)[sP]•[dR](T)[sP]• |
| | [dR](A)[sP]•[dR](C)[sP]•[dR](A)[sP]•[dR](T)[sP]•[dR](C)[sP]• |
| | [LR](T)[sP]•[dR](T)[sP]•[LR]([5meC])[sP]•[LR]([5meC]) |
| 1122_355 | [LR](A)[sP]•[LR](A)[sP]•[LR](T)[sP]•[LR]([5meC])[sP]•[dR](T)[sP]• |
| | [dR](T)[sP]•[dR](A)[MOPO]•[dR](T)[sP]•[dR](T)[sP]•[dR](T)[sP]• |
| | [dR](A)[sP]•[dR](C)[sP]•[dR](A)[sP]•[dR](T)[sP]•[dR](C)[sP]• |
| | [LR](T)[sP]•[dR](T)[sP]•[LR]([5meC])[sP]•[LR]([5meC]) |
| 1122_356 | [LR](A)[sP]•[LR](A)[sP]•[LR](T)[sP]•[LR]([5meC])[MOPO]•[dR](T)[sP]• |
| | [dR](T)[sP]•[dR](A)[sP]•[dR](T)[sP]•[dR](T)[sP]•[dR](T)[sP]• |
| | [dR](A)[sP]•[dR](C)[sP]•[dR](A)[sP]•[dR](T)[sP]•[dR](C)[sP]• |
| | [LR](T)[sP]•[dR](T)[sP]•[LR]([5meC])[sP]•[LR]([5meC]) |
| 1122_357 | [LR](A)[sP]•[LR](A)[sP]•[LR](T)[sP]•[LR]([5meC])[sP]•[dR](T)[sP]• |
| | [dR](T)[sP]•[dR](A)[sP]•[dR](T)[sP]•[dR](T)[sP]•[dR](T)[sP]• |
| | [dR](A)[sP]•[dR](C)[sP]•[dR](A)[MOPS]•[dR](T)[sP]•[dR](C)[sP]• |
| | [LR](T)[sP]•[dR](T)[sP]•[LR]([5meC])[sP]•[LR]([5meC]) |
| 1122_358 | [LR](A)[sP]•[LR](A)[sP]•[LR](T)[sP]•[LR]([5meC])[sP]•[dR](T)[sP]• |
| | [dR](T)[sP]•[dR](A)[sP]•[dR](T)[sP]•[dR](T)[sP]•[dR](T)[sP]• |
| | [dR](A)[sP]•[dR](C)[sP]•[dR](A)[sP]•[dR](T)[MOPS]•[dR](C)[sP]• |
| | [LR](T)[sP]•[dR](T)[sP]•[LR]([5meC])[sP]•[LR]([5meC]) |
| 1122_359 | [LR](A)[sP]•[LR](A)[sP]•[LR](T)[sP]•[LR]([5meC])[sP]•[dR](T)[sP]• |
| | [dR](T)[sP]•[dR](A)[sP]•[dR](T)[sP]•[dR](T)[sP]•[dR](T)[sP]• |
| | [dR](A)[sP]•[dR](C)[sP]•[dR](A)[sP]•[dR](T)[sP]•[dR](C)[MOPS]• |
| | [LR](T)[sP]•[dR](T)[sP]•[LR]([5meC])[sP]•[LR]([5meC]) |
| 1122_360 | [LR](A)[sP]•[LR](A)[sP]•[LR](T)[sP]•[LR]([5meC])[sP]•[dR](T)[sP]• |
| | [dR](T)[sP]•[dR](A)[sP]•[dR](T)[sP]•[dR](T)[sP]•[dR](T)[sP]• |
| | [dR](A)[sP]•[dR](C)[sP]•[dR](A)[sP]•[dR](T)[sP]•[dR](C)[sP]• |
| | [LR](T)[MOPO]•[dR](T)[sP]•[LR]([5meC])[sP]•[LR]([5meC]) |
| 1122_361 | [LR](A)[sP]•[dR](A)[sP]•[dR](T)[sP]•[LR]([5meC])[sP]•[dR](T)[sP]• |
| | [LR](T)[MOPO]•[dR](A)[sP]•[dR](T)[sP]•[dR](T)[sP]•[dR](T)[sP]• |
| | [dR](A)[sP]•[dR](C)[sP]•[dR](A)[sP]•[dR](T)[sP]•[dR](C)[sP]• |
| | [dR](T)[sP]•[LR](T)[sP]•[LR]([5meC])[sP]•[LR]([5meC]) |
| 1122_362 | [LR](A)[sP]•[dR](A)[sP]•[dR](T)[sP]•[LR]([5meC])[sP]•[dR](T)[sP]• |
| | [LR](T)[sP]•[dR](A)[MOPO]•[dR](T)[sP]•[dR](T)[sP]•[dR](T)[sP]• |
| | [dR](A)[sP]•[dR](C)[sP]•[dR](A)[sP]•[dR](T)[sP]•[dR](C)[sP]• |
| | [dR](T)[sP]•[LR](T)[sP]•[LR]([5meC])[sP]•[LR]([5meC]) |
| 1122_363 | [LR](A)[sP]•[dR](A)[sP]•[dR](T)[sP]•[LR]([5meC])[sP]•[dR](T)[sP]• |
| | [LR](T)[sP]•[dR](A)[sP]•[dR](T)[MOPO]•[dR](T)[sP]•[dR](T)[sP]• |
| | [dR](A)[sP]•[dR](C)[sP]•[dR](A)[sP]•[dR](T)[sP]•[dR](C)[sP]• |
| | [dR](T)[sP]•[LR](T)[sP]•[LR]([5meC])[sP]•[LR]([5meC]) |
| 1122_364 | [LR](A)[sP]•[dR](A)[sP]•[dR](T)[sP]•[LR]([5meC])[sP]•[dR](T)[sP]• |
| | [LR](T)[sP]•[dR](A)[sP]•[dR](T)[sP]•[dR](T)[MOPO]•[dR](T)[sP]• |
| | [dR](A)[sP]•[dR](C)[sP]•[dR](A)[sP]•[dR](T)[sP]•[dR](C)[sP]• |
| | [dR](T)[sP]•[LR](T)[sP]•[LR]([5meC])[sP]•[LR]([5meC]) |
| 1122_365 | [LR](A)[sP]•[dR](A)[sP]•[dR](T)[sP]•[LR]([5meC])[sP]•[dR](T)[sP]• |
| | [LR](T)[sP]•[dR](A)[sP]•[dR](T)[sP]•[dR](T)[sP]•[dR](T)[MOPO]• |
| | [dR](A)[sP]•[dR](C)[sP]•[dR](A)[sP]•[dR](T)[sP]•[dR](C)[sP]• |
| | [dR](T)[sP]•[LR](T)[sP]•[LR]([5meC])[sP]•[LR]([5meC]) |
| 1122_366 | [LR](A)[sP]•[dR](A)[sP]•[dR](T)[sP]•[LR]([5meC])[sP]•[dR](T)[sP]• |
| | [LR](T)[sP]•[dR](A)[sP]•[dR](T)[sP]•[dR](T)[sP]•[dR](T)[sP]• |
| | [dR](A)[MOPO]•[dR](C)[sP]•[dR](A)[sP]•[dR](T)[sP]•[dR](C)[sP]• |
| | [dR](T)[sP]•[LR](T)[sP]•[LR]([5meC])[sP]•[LR]([5meC]) |
| 1122_367 | [LR](A)[sP]•[dR](A)[sP]•[dR](T)[sP]•[LR]([5meC])[sP]•[dR](T)[sP]• |
| | [LR](T)[sP]•[dR](A)[sP]•[dR](T)[sP]•[dR](T)[sP]•[dR](T)[sP]• |
| | [dR](A)[sP]•[dR](C)[MOPO]•[dR](A)[sP]•[dR](T)[sP]•[dR](C)[sP]• |
| | [dR](T)[sP]•[LR](T)[sP]•[LR]([5meC])[sP]•[LR]([5meC]) |
| 1122_368 | [LR](A)[sP]•[dR](A)[sP]•[dR](T)[sP]•[LR]([5meC])[sP]•[dR](T)[sP]• |
| | [LR](T)[sP]•[dR](A)[sP]•[dR](T)[sP]•[dR](T)[sP]•[dR](T)[sP]• |
| | [dR](A)[sP]•[dR](C)[sP]•[dR](A)[MOPO]•[dR](T)[sP]•[dR](C)[sP]• |
| | [dR](T)[sP]•[LR](T)[sP]•[LR]([5meC])[sP]•[LR]([5meC]) |
| 1122_369 | [LR](A)[sP]•[dR](A)[sP]•[dR](T)[sP]•[LR]([5meC])[sP]•[dR](T)[sP]• |
| | [LR](T)[sP]•[dR](A)[sP]•[dR](T)[sP]•[dR](T)[sP]•[dR](T)[sP]• |
| | [dR](A)[sP]•[dR](C)[sP]•[dR](A)[sP]•[dR](T)[MOPO]•[dR](C)[sP]• |
| | [dR](T)[sP]•[LR](T)[sP]•[LR]([5meC])[sP]•[LR]([5meC]) |
| 1122_370 | [LR](A)[sP]•[dR](A)[sP]•[dR](T)[sP]•[LR]([5meC])[sP]•[dR](T)[sP]• |
| | [LR](T)[sP]•[dR](A)[sP]•[dR](T)[sP]•[dR](T)[sP]•[dR](T)[sP]• |
| | [dR](A)[sP]•[dR](C)[sP]•[dR](A)[sP]•[dR](T)[sP]•[dR](C)[MOPO]• |
| | [dR](T)[sP]•[LR](T)[sP]•[LR]([5meC])[sP]•[LR]([5meC]) |
| 1122_371 | [LR](A)[sP]•[dR](A)[sP]•[dR](T)[sP]•[LR]([5meC])[sP]•[dR](T)[sP]• |
| | [LR](T)[sP]•[dR](A)[sP]•[dR](T)[sP]•[dR](T)[sP]•[dR](T)[sP]• |
| | [dR](A)[sP]•[dR](C)[sP]•[dR](A)[sP]•[dR](T)[sP]•[dR](C)[sP]• |
| | [dR](T)[MOPO]•[LR](T)[sP]•[LR]([5meC])[sP]•[LR]([5meC]) |
| 1122_372 | [LR](A)[sP]•[dR](A)[sP]•[dR](T)[sP]•[LR]([5meC])[sP]•[dR](T)[sP]• |
| | [LR](T)[sP]•[dR](A)[sP]•[dR](T)[sP]•[dR](T)[sP]•[dR](T)[sP]• |
| | [dR](A)[sP]•[dR](C)[sP]•[dR](A)[sP]•[dR](T)[sP]•[dR](C)[sP]• |
| | [dR](T)[sP]•[LR](T)[MOPO]•[LR]([5meC])[sP]•[LR]([5meC]) |
| 1122_373 | [LR](A)[sP]•[LR](A)[sP]•[dR](T)[sP]•[LR]([5meC])[sP]•[dR](T)[sP]• |
| | [dR](T)[sP]•[LR](A)[MOPO]•[dR](T)[sP]•[dR](T)[sP]•[dR](T)[sP]• |
| | [dR](A)[sP]•[dR](C)[sP]•[dR](A)[sP]•[dR](T)[sP]•[dR](C)[sP]• |
| | [LR](T)[sP]•[dR](T)[sP]•[LR]([5meC])[sP]•[LR]([5meC]) |
| 1122_374 | [LR](A)[sP]•[LR](A)[sP]•[dR](T)[sP]•[LR]([5meC])[sP]•[dR](T)[sP]• |
| | [dR](T)[sP]•[LR](A)[sP]•[dR](T)[MOPO]•[dR](T)[sP]•[dR](T)[sP]• |
| | [dR](A)[sP]•[dR](C)[sP]•[dR](A)[sP]•[dR](T)[sP]•[dR](C)[sP]• |
| | [LR](T)[sP]•[dR](T)[sP]•[LR]([5meC])[sP]•[LR]([5meC]) |
| 1122_375 | [LR](A)[sP]•[LR](A)[sP]•[dR](T)[sP]•[LR]([5meC])[sP]•[dR](T)[sP]• |
| | [dR](T)[sP]•[LR](A)[sP]•[dR](T)[sP]•[dR](T)[MOPO]•[dR](T)[sP]• |
| | [dR](A)[sP]•[dR](C)[sP]•[dR](A)[sP]•[dR](T)[sP]•[dR](C)[sP]• |
| | [LR](T)[sP]•[dR](T)[sP]•[LR]([5meC])[sP]•[LR]([5meC]) |
| 1122_376 | [LR](A)[sP]•[LR](A)[sP]•[dR](T)[sP]•[LR]([5meC])[sP]•[dR](T)[sP]• |
| | [dR](T)[sP]•[LR](A)[sP]•[dR](T)[sP]•[dR](T)[sP]•[dR](T)[MOPO]• |
| | [dR](A)[sP]•[dR](C)[sP]•[dR](A)[sP]•[dR](T)[sP]•[dR](C)[sP]• |
| | [LR](T)[sP]•[dR](T)[sP]•[LR]([5meC])[sP]•[LR]([5meC]) |
| 1122_377 | [LR](A)[sP]•[LR](A)[sP]•[dR](T)[sP]•[LR]([5meC])[sP]•[dR](T)[sP]• |
| | [dR](T)[sP]•[LR](A)[sP]•[dR](T)[sP]•[dR](T)[sP]•[dR](T)[sP]• |
| | [dR](A)[MOPO]•[dR](C)[sP]•[dR](A)[sP]•[dR](T)[sP],[dR](C)[sP]• |
| | [LR](T)[sP]•[dR](T)[sP]•[LR]([5meC])[sP]•[LR]([5meC]) |
| 1122_378 | [LR](A)[sP]•[LR](A)[sP]•[dR](T)[sP]•[LR]([5meC])[sP]•[dR](T)[sP]• |
| | [dR](T)[sP]•[LR](A)[sP]•[dR](T)[sP]•[dR](T)[sP]•[dR](T)[sP]• |
| | [dR](A)[sP]•[dR](C)[MOPO]•[dR](A)[sP]•[dR](T)[sP]•[dR](C)[sP]• |
| | [LR](T)[sP]•[dR](T)[sP]•[LR]([5meC])[sP]•[LR]([5meC]) |
| 1122_379 | [LR](A)[sP]•[LR](A)[sP]•[dR](T)[sP]•[LR]([5meC])[sP]•[dR](T)[sP]• |
| | [dR](T)[sP]•[LR](A)[sP]•[dR](T)[sP]•[dR](T)[sP]•[dR](T)[sP]• |
| | [dR](A)[sP]•[dR](C)[sP]•[dR](A)[MOPO]•[dR](T)[sP]•[dR](C)[sP]• |
| | [LR](T)[sP]•[dR](T)[sP]•[LR]([5meC])[sP]•[LR]([5meC]) |
| 1122_380 | [LR](A)[sP]•[LR](A)[sP]•[dR](T)[sP]•[LR]([5meC])[sP]•[dR](T)[sP]• |
| | [dR](T)[sP]•[LR](A)[sP]•[dR](T)[sP]•[dR](T)[sP]•[dR](T)[sP]• |
| | [dR](A)[sP]•[dR](C)[sP]•[dR](A)[sP]•[dR](T)[MOPO]•[dR](C)[sP]• |
| | [LR](T)[sP]•[dR](T)[sP]•[LR]([5meC])[sP]•[LR]([5meC]) |
| 1122_381 | [LR](A)[sP]•[LR](A)[sP]•[dR](T)[sP]•[LR]([5meC])[sP]•[dR](T)[sP]• |
| | [dR](T)[sP]•[LR](A)[sP]•[dR](T)[sP]•[dR](T)[sP]•[dR](T)[sP]• |
| | [dR](A)[sP]•[dR](C)[sP]•[dR](A)[sP]•[dR](T)[sP]•[dR](C)[MOPO]• |
| | [LR](T)[sP]•[dR](T)[sP]•[LR]([5meC])[sP]•[LR]([5meC]) |
| 1122_382 | [LR](A)[sP]•[LR](A)[sP]•[dR](T)[sP]•[LR]([5meC])[sP]•[dR](T)[sP]• |
| | [dR](T)[sP]•[LR](A)[sP]•[dR](T)[sP]•[dR](T)[sP]•[dR](T)[sP]• |
| | [dR](A)[sP]•[dR](C)[sP]•[dR](A)[sP]•[dR](T)[sP]•[dR](C)[sP]• |
| | [LR](T)[MOPO]•[dR](T)[sP]•[LR]([5meC])[sP]•[LR]([5meC]) |
| 1122_383 | [LR](A)[sP]•[LR](A)[sP]•[LR](T)[sP]•[LR]([5meC])[MOPS]•[dR](T)[sP]• |
| | [dR](T)[sP]•[dR](A)[sP]•[dR](T)[sP]•[dR](T)[sP]•[dR](T)[sP]• |
| | [dR](A)[sP]•[dR](C)[sP]•[dR](A)[sP]•[dR](T)[sP]•[dR](C)[sP]• |
| | [LR](T)[sP]•[dR](T)[sP]•[LR]([5meC])[sP]•[LR]([5meC]) |
| 1122_384 | [LR](A)[sP]•[LR](A)[sP]•[LR](T)[sP]•[LR]([5meC])[sP]•[dR](T)[sP]• |
| | [dR](T)[sP]•[dR](A)[sP]•[dR](T)[sP]•[dR](T)[sP]•[dR](T)[sP]• |
| | [dR](A)[sP]•[dR](C)[sP]•[dR](A)[sP]•[dR](T)[sP]•[dR](C)[sP]• |
| | [LR](T)[MOPS]•[dR](T)[sP]•[LR]([5meC])[sP]•[LR]([5meC]) |
| 1122_385 | [LR](A)[sP]•[dR](A)[sP]•[dR](T)[sP]•[LR]([5meC])[sP]•[dR](T)[sP]• |
| | [LR](T)[MOPS]•[dR](A)[sP]•[dR](T)[sP]•[dR](T)[sP]•[dR](T)[sP]• |
| | [dR](A)[sP]•[dR](C)[sP]•[dR](A)[sP]•[dR](T)[sP]•[dR](C)[sP]• |
| | [dR](T)[sP]•[LR](T)[sP]•[LR]([5meC])[sP]•[LR]([5meC]) |
| 1122_386 | [LR](A)[sP]•[dR](A)[sP]•[dR](T)[sP]•[LR]([5meC])[sP]•[dR](T)[sP]• |
| | [LR](T)[sP]•[dR](A)[MOPS]•[dR](T)[sP]•[dR](T)[sP]•[dR](T)[sP]• |
| | [dR](A)[sP]•[dR](C)[sP]•[dR](A)[sP]•[dR](T)[sP]•[dR](C)[sP]• |
| | [dR](T)[sP]•[LR](T)[sP]•[LR]([5meC])[sP]•[LR]([5meC]) |
| 1122_387 | [LR](A)[sP]•[dR](A)[sP]•[dR](T)[sP]•[LR]([5meC])[sP]•[dR](T)[sP]• |
| | [LR](T)[sP]•[dR](A)[sP]•[dR](T)[MOPS]•[dR](T)[sP]•[dR](T)[sP]• |
| | [dR](A)[sP]•[dR](C)[sP]•[dR](A)[sP]•[dR](T)[sP]•[dR](C)[sP]• |
| | [dR](T)[sP]•[LR](T)[sP]•[LR]([5meC])[sP]•[LR]([5meC]) |
| 1122_388 | [LR](A)[sP]•[dR](A)[sP]•[dR](T)[sP]•[LR]([5meC])[sP]•[dR](T)[sP]• |
| | [LR](T)[sP]•[dR](A)[sP]•[dR](T)[sP]•[dR](T)[MOPS]•[dR](T)[sP]• |
| | [dR](A)[sP]•[dR](C)[sP]•[dR](A)[sP]•[dR](T)[sP]•[dR](C)[sP]• |
| | [dR](T)[sP]•[LR](T)[sP]•[LR]([5meC])[sP]•[LR]([5meC]) |
| 1122_389 | [LR](A)[sP]•[dR](A)[sP]•[dR](T)[sP]•[LR]([5meC])[sP]•[dR](T)[sP]• |
| | [LR](T)[sP]•[dR](A)[sP]•[dR](T)[sP]•[dR](T)[sP]•[dR](T)[MOPS]• |
| | [dR](A)[sP]•[dR](C)[sP]•[dR](A)[sP]•[dR](T)[sP]•[dR](C)[sP]• |
| | [dR](T)[sP]•[LR](T)[sP]•[LR]([5meC])[sP]•[LR]([5meC]) |
| 1122_390 | [LR](A)[sP]•[dR](A)[sP]•[dR](T)[sP]•[LR]([5meC])[sP]•[dR](T)[sP]• |
| | [LR](T)[sP]•[dR](A)[sP]•[dR](T)[sP]•[dR](T)[sP]•[dR](T)[sP]• |
| | [dR](A)[MOPS]•[dR](C)[sP]•[dR](A)[sP]•[dR](T)[sP]•[dR](C)[sP]• |
| | [dR](T)[sP]•[LR](T)[sP]•[LR]([5meC])[sP]•[LR]([5meC]) |
| 1122_391 | [LR](A)[sP]•[dR](A)[sP]•[dR](T)[sP]•[LR]([5meC])[sP]•[dR](T)[sP]• |
| | [LR](T)[sP]•[dR](A)[sP]•[dR](T)[sP]•[dR](T)[sP]•[dR](T)[sP]• |
| | [dR](A)[sP]•[dR](C)[MOPS]•[dR](A)[sP]•[dR](T)[sP]•[dR](C)[sP]• |
| | [dR](T)[sP]•[LR](T)[sP]•[LR]([5meC])[sP]•[LR]([5meC]) |
| 1122_392 | [LR](A)[sP]•[dR](A)[sP]•[dR](T)[sP]•[LR]([5meC])[sP]•[dR](T)[sP]• |
| | [LR](T)[sP]•[dR](A)[sP]•[dR](T)[sP]•[dR](T)[sP]•[dR](T)[sP]• |
| | [dR](A)[sP]•[dR](C)[sP]•[dR](A)[MOPS]•[dR](T)[sP]•[dR](C)[sP]• |
| | [dR](T)[sP]•[LR](T)[sP]•[LR]([5meC])[sP]•[LR]([5meC]) |
| 1122_393 | [LR](A)[sP]•[dR](A)[sP]•[dR](T)[sP]•[LR]([5meC])[sP]•[dR](T)[sP]• |
| | [LR](T)[sP]•[dR](A)[sP]•[dR](T)[sP]•[dR](T)[sP]•[dR](T)[sP]• |
| | [dR](A)[sP]•[dR](C)[sP]•[dR](A)[sP]•[dR](T)[MOPS]•[dR](C)[sP]• |
| | [dR](T)[sP]•[LR](T)[sP]•[LR]([5meC])[sP]•[LR]([5meC]) |
| 1122_394 | [LR](A)[sP]•[dR](A)[sP]•[dR](T)[sP]•[LR]([5meC])[sP]•[dR](T)[sP]• |
| | [LR](T)[sP]•[dR](A)[sP]•[dR](T)[sP]•[dR](T)[sP]•[dR](T)[sP]• |
| | [dR](A)[sP]•[dR](C)[sP]•[dR](A)[sP]•[dR](T)[sP]•[dR](C)[MOPS]• |
| | [dR](T)[sP]•[LR](T)[sP]•[LR]([5meC])[sP]•[LR]([5meC]) |
| 1122_395 | [LR](A)[sP]•[dR](A)[sP]•[dR](T)[sP]•[LR]([5meC])[sP]•[dR](T)[sP]• |
| | [LR](T)[sP]•[dR](A)[sP]•[dR](T)[sP]•[dR](T)[sP]•[dR](T)[sP]• |
| | [dR](A)[sP]•[dR](C)[sP]•[dR](A)[sP]•[dR](T)[sP]•[dR](C)[sP]• |
| | [dR](T)[MOPS]•[LR](T)[sP]•[LR]([5meC])[sP]•[LR]([5meC]) |
| 1122_396 | [LR](A)[sP]•[dR](A)[sP]•[dR](T)[sP]•[LR]([5meC])[sP]•[dR](T)[sP]• |
| | [LR](T)[sP]•[dR](A)[sP]•[dR](T)[sP]•[dR](T)[sP]•[dR](T)[sP]• |
| | [dR](A)[sP]•[dR](C)[sP]•[dR](A)[sP]•[dR](T)[sP]•[dR](C)[sP]• |
| | [dR](T)[sP]•[LR](T)[MOPS]•[LR]([5meC])[sP]•[LR]([5meC]) |
| 1122_397 | [LR](A)[sP]•[LR](A)[sP]•[dR](T)[sP]•[LR]([5meC])[sP]•[dR](T)[sP]• |
| | [dR](T)[sP]•[LR](A)[MOPS]•[dR](T)[sP]•[dR](T)[sP]•[dR](T)[sP]• |
| | [dR](A)[sP]•[dR](C)[sP]•[dR](A)[sP]•[dR](T)[sP]•[dR](C)[sP]• |
| | [LR](T)[sP]•[dR](T)[sP]•[LR]([5meC])[sP]•[LR]([5meC]) |
| 1122_398 | [LR](A)[sP]•[LR](A)[sP]•[dR](T)[sP]•[LR]([5meC])[sP]•[dR](T)[sP]• |
| | [dR](T)[sP]•[LR](A)[sP]•[dR](T)[MOPS]•[dR](T)[sP]•[dR](T)[sP]• |
| | [dR](A)[sP]•[dR](C)[sP]•[dR](A)[sP]•[dR](T)[sP]•[dR](C)[sP]• |
| | [LR](T)[sP]•[dR](T)[sP]•[LR]([5meC])[sP]•[LR]([5meC]) |
| 1122_399 | [LR](A)[sP]•[LR](A)[sP]•[dR](T)[sP]•[LR]([5meC])[sP]•[dR](T)[sP]• |
| | [dR](T)[sP]•[LR](A)[sP]•[dR](T)[sP]•[dR](T)[MOPS]•[dR](T)[sP]• |
| | [dR](A)[sP]•[dR](C)[sP]•[dR](A)[sP]•[dR](T)[sP]•[dR](C)[sP]• |
| | [LR](T)[sP]•[dR](T)[sP]•[LR]([5meC])[sP]•[LR]([5meC]) |
| 1122_400 | [LR](A)[sP]•[LR](A)[sP]•[dR](T)[sP]•[LR]([5meC])[sP]•[dR](T)[sP]• |
| | [dR](T)[sP]•[LR](A)[sP]•[dR](T)[sP]•[dR](T)[sP]•[dR](T)[MOPS]• |
| | [dR](A)[sP]•[dR](C)[sP]•[dR](A)[sP]•[dR](T)[sP]•[dR](C)[sP]• |
| | [LR](T)[sP]•[dR](T)[sP]•[LR]([5meC])[sP]•[LR]([5meC]) |
| 1122_401 | [LR](A)[sP]•[LR](A)[sP]•[dR](T)[sP]•[LR]([5meC])[sP]•[dR](T)[sP]• |
| | [dR](T)[sP]•[LR](A)[sP]•[dR](T)[sP]•[dR](T)[sP]•[dR](T)[sP]• |
| | [dR](A)[MOPS]•[dR](C)[sP]•[dR](A)[sP]•[dR](T)[sP]•[dR](C)[sP]• |
| | [LR](T)[sP]•[dR](T)[sP]•[LR]([5meC])[sP]•[LR]([5meC]) |
| 1122_402 | [LR](A)[sP]•[LR](A)[sP]•[dR](T)[sP]•[LR]([5meC])[sP]•[dR](T)[sP]• |
| | [dR](T)[sP]•[LR](A)[sP]•[dR](T)[sP]•[dR](T)[sP]•[dR](T)[sP]• |
| | [dR](A)[sP]•[dR](C)[MOPS]•[dR](A)[sP]•[dR](T)[sP]•[dR](C)[sP]• |
| | [LR](T)[sP]•[dR](T)[sP]•[LR]([5meC])[sP]•[LR]([5meC]) |
| 1122_403 | [LR](A)[sP]•[LR](A)[sP]•[dR](T)[sP]•[LR]([5meC])[sP]•[dR](T)[sP]• |
| | [dR](T)[sP]•[LR](A)[sP]•[dR](T)[sP]•[dR](T)[sP]•[dR](T)[sP]• |
| | [dR](A)[sP]•[dR](C)[sP]•[dR](A)[MOPS]•[dR](T)[sP]•[dR](C)[sP]• |
| | [LR](T)[sP]•[dR](T)[sP]•[LR]([5meC])[sP]•[LR]([5meC]) |
| 1122_404 | [LR](A)[sP]•[LR](A)[sP]•[dR](T)[sP]•[LR]([5meC])[sP]•[dR](T)[sP]• |
| | [dR](T)[sP]•[LR](A)[sP]•[dR](T)[sP]•[dR](T)[sP]•[dR](T)[sP]• |
| | [dR](A)[sP]•[dR](C)[sP]•[dR](A)[sP]•[dR](T)[MOPS]•[dR](C)[sP]• |
| | [LR](T)[sP]•[dR](T)[sP]•[LR]([5meC])[sP]•[LR]([5meC]) |
| 1122_405 | [LR](A)[sP]•[LR](A)[sP]•[dR](T)[sP]•[LR]([5meC])[sP]•[dR](T)[sP]• |
| | [dR](T)[sP]•[LR](A)[sP]•[dR](T)[sP]•[dR](T)[sP]•[dR](T)[sP]• |
| | [dR](A)[sP]•[dR](C)[sP]•[dR](A)[sP]•[dR](T)[sP]•[dR](C)[MOPS]• |
| | [LR](T)[sP]•[dR](T)[sP]•[LR]([5meC])[sP]•[LR]([5meC]) |
| 1122_406 | [LR](A)[sP]•[LR](A)[sP]•[dR](T)[sP]•[LR]([5meC])[sP]•[dR](T)[sP]• |
| | [dR](T)[sP]•[LR](A)[sP]•[dR](T)[sP]•[dR](T)[sP]•[dR](T)[sP]• |
| | [dR](A)[sP]•[dR](C)[sP]•[dR](A)[sP]•[dR](T)[sP]•[dR](C)[sP]• |
| | [LR](T)[MOPS]•[dR](T)[sP]•[LR]([5meC])[sP]•[LR]([5meC]) |
| 1816_2 | [LR](G)[sP]•[LR](A)[sP]•[dR](A)[sP]•[dR](T)[sP]•[LR]([5meC])[sP]• |
| | [dR](T)[sP]•[LR](T)[sP]•[LR](A)[sP]•[dR](T)[sP]•[dR](T)[sP]• |
| | [dR](T)[sP]•[dR](A)[sP]•[LR]([5meC])[sP]•[dR](A)[sP]•[dR](T)[sP]• |
| | [LR]([5meC])[sP]•[LR](T)[sP]•[LR](T) |
| 1816_3 | [LR](G)[sP]•[LR](A)[sP]•[dR](A)[sP]•[dR](T)[sP]•[LR]([5meC])[sP]• |
| | [dR](T)[sP]•[LR](T)[sP]•[LR](A)[sP]•[dR](T)[sP]•[dR](T)[sP]• |
| | [dR](T)[sP]•[dR](A)[sP]•[MOE]([5meC])[sP]•[dR](A)[sP]•[dR](T)[sP]• |
| | [LR]([5meC])[sP]•[LR](T)[sP]•[LR](T) |
| 1816_4 | [LR](G)[sP]•[LR](A)[sP]•[dR](A)[sP]•[dR](T)[sP]•[LR]([5meC])[sP]• |
| | [dR](T)[sP]•[LR](T)[sP]•[LR](A)[sP]•[dR](T)[sP]•[dR](T)[sP]• |
| | [dR](T)[sP]•[dR](A)[sP]•[dR](C)[sP]•[dR](A)[sP]•[dR](T)[sP]• |
| | [LR]([5meC])[sP]•[mR](U)[sP]•[LR](T) |
| 1816_5 | [LR](G)[sP]•[LR](A)[sP]•[dR](A)[sP]•[dR](T)[sP]•[LR]([5meC])[sP]• |
| | [dR](T)[sP]•[LR](T)[sP]•[LR](A)[sP]•[dR](T)[sP]•[dR](T)[sP]• |
| | [dR](T)[sP]•[dR](A)[sP]•[dR](C)[sP]•[dR](A)[sP]•[mR](U)[sP]• |
| | [LR]([5meC])[sP]•[LR](T)[sP]•[LR](T) |
| 1816_6 | [LR](G)[sP]•[LR](A)[sP]•[dR](A)[sP]•[dR](T)[sP]•[LR]([5meC])[sP]• |
| | [dR](T)[sP]•[LR](T)[sP]•[LR](A)[sP]•[dR](T)[sP]•[dR](T)[sP]• |
| | [mR](U)[sP]•[dR](A)[sP]•[dR](C)[sP]•[dR](A)[sP]•[dR](T)[sP]• |
| | [LR]([5meC])[sP]•[LR](T)[sP]•[LR](T) |
| 1816_7 | [LR](G)[sP]•[LR](A)[sP]•[dR](A)[sP]•[dR](T)[sP]•[LR]([5meC])[sP]• |
| | [dR](T)[sP]•[LR](T)[sP]•[LR](A)[sP]•[dR](T)[sP]•[mR](U)[sP]• |
| | [dR](T)[sP]•[dR](A)[sP]•[dR](C)[sP]•[dR](A)[sP]•[dR](T)[sP]• |
| | [LR]([5meC])[sP]•[LR](T)[sP]•[LR](T) |
| 1816_8 | [LR](G)[sP]•[LR](A)[sP]•[dR](A)[sP]•[dR](T)[sP]•[LR]([5meC])[sP]• |
| | [dR](T)[sP]•[LR](T)[sP]•[LR](A)[sP]•[mR](U)[sP]•[dR](T)[sP]• |
| | [dR](T)[sP]•[dR](A)[sP]•[dR](C)[sP]•[dR](A)[sP]•[dR](T)[sP]• |
| | [LR]([5meC])[sP]•[LR](T)[sP]•[LR](T) |
| 1816_9 | [LR](G)[sP]•[LR](A)[sP]•[dR](A)[sP]•[dR](T)[sP]•[LR]([5meC])[sP]• |
| | [dR](T)[sP]•[mR](U)[sP]•[LR](A)[sP]•[dR](T)[sP]•[dR](T)[sP]• |
| | [dR](T)[sP]•[dR](A)[sP]•[dR](C)[sP]•[dR](A)[sP]•[dR](T)[sP]• |
| | [LR]([5meC])[sP]•[LR](T)[sP]•[LR](T) |
| 1816_10 | [LR](G)[sP]•[LR](A)[sP]•[dR](A)[sP]•[dR](T)[sP]•[LR]([5meC])[sP]• |
| | [mR](U)[sP]•[LR](T)[sP]•[LR](A)[sP]•[dR](T)[sP]•[dR](T)[sP]• |
| | [dR](T)[sP]•[dR](A)[sP]•[dR](C)[sP]•[dR](A)[sP]•[dR](T)[sP]• |
| | [LR]([5meC])[sP]•[LR](T)[sP]•[LR](T) |
| 1816_11 | [LR](G)[sP]•[LR](A)[sP]•[dR](A)[sP]•[mR](U)[sP]•[LR]([5meC])[sP]• |
| | [dR](T)[sP]•[LR](T)[sP]•[LR](A)[sP]•[dR](T)[sP]•[dR](T)[sP]• |
| | [dR](T)[sP]•[dR](A)[sP]•[dR](C)[sP]•[dR](A)[sP]•[dR](T)[sP]• |
| | [LR]([5meC])[sP]•[LR](T)[sP]•[LR](T) |
| 1816_12 | [LR](G)[sP]•[LR](A)[sP]•[dR](A)[sP]•[dR](T)[sP]•[LR]([5meC])[sP]• |
| | [dR](T)[sP]•[LR](T)[sP]•[LR](A)[sP]•[dR](T)[sP]•[dR](T)[sP]• |
| | [dR](T)[sP]•[dR](A)[sP]•[dR](C)[sP]•[dR](A)[sP]•[dR](T)[sP]• |
| | [LR]([5meC])[sP]•[LR](T)[sP]•[LR](T) |
| 1816_13 | [LR](G)[sP]•[LR](A)[sP]•[dR](A)[sP]•[dR](T)[sP]•[LR]([5meC])[sP]• |
| | [dR](T)[sP]•[LR](T)[sP]•[LR](A)[sP]•[dR](T)[sP]•[dR](T)[sP]• |
| | [dR](T)[sP]•[dR](A)[ssP]•[dR](C)[sP]•[dR](A)[sP]•[dR](T)[sP]• |
| | [LR]([5meC])[sP]•[LR](T)[sP]•[LR](T) |
| 1816_14 | [LR](G)[sP]•[LR](A)[sP]•[dR](A)[sP]•[dR](T)[sP]•[LR]([5meC])[sP]• |
| | [dR](T)[sP]•[LR](T)[sP]•[LR](A)[sP]•[dR](T)[sP]•[dR](T)[sP]• |
| | [dR](T)[sP]•[dR](A)[sP]•[dR](C)[ssP]•[dR](A)[sP]•[dR](T)[sP]• |
| | [LR]([5meC])[sP]•[LR](T)[sP]•[LR](T) |
| 1816_15 | [LR](G)[sP]•[LR](A)[sP]•[dR](A)[sP]•[dR](T)[sP]•[LR]([5meC])[sP]• |
| | [dR](T)[sP]•[LR](T)[sP]•[LR](A)[sP]•[dR](T)[sP]•[dR](T)[sP]• |
| | [dR](T)[sP]•[dR](A)[sP]•[dR](C)[sP]•[dR](A)[ssP]•[dR](T)[sP]• |
| | [LR]([5meC])[sP]•[LR](T)[sP]•[LR](T) |
| 1816_16 | [LR](G)[sP]•[LR](A)[sP]•[dR](A)[sP]•[dR](T)[sP]•[LR]([5meC])[sP]• |
| | [dR](T)[sP]•[LR](T)[sP]•[LR](A)[sP]•[dR](T)[sP]•[dR](T)[sP]• |
| | [dR](T)[sP]•[dR](A)[sP]•[dR](C)[sP]•[dR](A)[sP]•[dR](T)[ssP]• |
| | [LR]([5meC])[sP]•[LR](T)[sP]•[LR](T) |
| 1816_17 | [LR](G)[sP]•[LR](A)[sP]•[dR](A)[sP]•[dR](T)[sP]•[LR]([5meC])[sP]• |
| | [dR](T)[sP]•[LR](T)[sP]•[LR](A)[sP]•[dR](T)[sP]•[dR](T)[sP]• |
| | [dR](T)[sP]•[dR](A)[sP]•[dR](C)[sP]•[dR](A)[sP]•[dR](T)[sP]• |
| | [LR]([5meC])[ssP]•[LR](T)[sP]•[LR](T) |
| 1816_18 | [LR](G)[sP]•[LR](A)[sP]•[dR](A)[sP]•[dR](T)[sP]•[LR]([5meC])[sP]• |
| | [dR](T)[sP]•[LR](T)[sP]•[LR](A)[ssP]•[dR](T)[sP]•[dR](T)[sP]• |
| | [dR](T)[sP]•[dR](A)[sP]•[dR](C)[sP]•[dR](A)[sP]•[dR](T)[sP]• |
| | [LR]([5meC])[sP]•[LR](T)[sP]•[LR](T) |
| 1816_19 | [LR](G)[sP]•[LR](A)[sP]•[dR](A)[sP]•[dR](T)[sP]•[LR]([5meC])[sP]• |
| | [dR](T)[sP]•[LR](T)[sP]•[LR](A)[sP]•[dR](T)[ssP]•[dR](T)[sP]• |
| | [dR](T)[sP]•[dR](A)[sP]•[dR](C)[sP]•[dR](A)[sP]•[dR](T)[sP]• |
| | [LR]([5meC])[sP]•[LR](T)[sP]•[LR](T) |
| 1816_20 | [LR](G)[sP]•[LR](A)[sP]•[dR](A)[sP]•[dR](T)[sP]•[LR]([5meC])[sP]• |
| | [dR](T)[sP]•[LR](T)[sP]•[LR](A)[sP]•[dR](T)[sP]•[dR](T)[ssP]• |
| | [dR](T)[sP]•[dR](A)[sP]•[dR](C)[sP]•[dR](A)[sP]•[dR](T)[sP]• |
| | [LR]([5meC])[sP]•[LR](T)[sP]•[LR](T) |
| 1816_21 | [LR](G)[sP]•[LR](A)[sP]•[dR](A)[sP]•[dR](T)[sP]•[LR]([5meC])[sP]• |
| | [dR](T)[sP]•[LR](T)[sP]•[LR](A)[sP]•[dR](T)[sP]•[dR](T)[sP]• |
| | [dR](T)[ssP]•[dR](A)[sP]•[dR](C)[sP]•[dR](A)[sP]•[dR](T)[sP]• |
| | [LR]([5meC])[sP]•[LR](T)[sP]•[LR](T) |
| 1816_22 | [MOE](G)[sP]•[MOE](A)[sP]•[dR](A)[sP]•[dR](T)[sP]•[MOE]([5meC])[sP]• |
| | [dR](T)[sP]•[MOE](T)[sP]•[MOE](A)[sP]•[dR](T)[sP]•[dR](T)[sP]• |
| | [dR](T)[sP]•[dR](A)[sP]•[dR](C)[sP]•[dR](A)[sP]•[dR](T)[sP]• |
| | [MOE]([5meC])[sP]•[MOE](T)[sP]•[MOE](T) |
| 1816_23 | [MOE](G)[sP]•[LR](A)[sP]•[dR](A)[sP]•[dR](T)[sP]•[LR]([5meC])[sP]• |
| | [dR](T)[sP]•[LR](T)[sP]•[LR](A)[sP]•[dR](T)[sP]•[dR](T)[sP]• |
| | [dR](T)[sP]•[dR](A)[sP]•[dR](C)[sP]•[dR](A)[sP]•[dR](T)[sP]• |
| | [LR]([5meC])[sP]•[LR](T)[sP]•[MOE](T) |
| 1816_24 | [MOE](G)[sP]•[MOE](A)[sP]•[MOE](A)[sP]•[MOE](T)[sP]•[MOE]([5meC])[sP]• |
| | [MOE](T)[sP]•[MOE](T)[sP]•[dR](A)[sP]•[dR](T)[sP]•[dR](T)[sP]• |
| | [dR](T)[sP]•[dR](A)[sP]•[dR](C)[sP]•[dR](A)[sP]•[MOE](T)[sP]• |
| | [MOE]([5meC])[sP]•[MOE](T)[sP]•[MOE](T) |
| 1816_25 | [MOE](G)[sP]•[MOE](A)[sP]•[dR](A)[sP]•[dR](T)[sP]•[MOE]([5meC])[sP]• |
| | [dR](T)[sP]•[MOE](T)P•[MOE](A)[sP]•[dR](T)[sP]•[dR](T)[sP]• |
| | [dR](T)[sP]•[dR](A)[sP]•[dR](C)[sP]•[dR](A)[sP]•[dR](T)[sP]• |
| | [MOE]([5meC])[sP]•[MOE](T)[sP]•[MOE](T) |
| 1816_26 | [MOE](G)[sP]•[MOE](A)P•[MOE](A)P[MOE](T)P•[MOE]([5meC])P•[MOE](T)P• |
| | [MOE](T)[sP]•[dR](A)[sP]•[dR](T)[sP]•[dR](T)[sP]•[dR](T)[sP]• |
| | [dR](A)[sP]•[dR](C)[sP]•[dR](A)[sP]•[MOE](T)P•[MOE]([5meC])[sP]• |
| | [MOE](T)[sP]•[MOE](T) |
| 1816_27 | [LR](G)[sP]•[fR](A)[sP]•[dR](A)[sP]•[dR](T)[sP]•[LR]([5meC])[sP]• |
| | [dR](T)[sP]•[LR](T)[sP]•[LR](A)[sP]•[dR](T)[sP]•[dR](T)[sP]• |
| | [dR](T)[sP]•[dR](A)[sP]•[dR](C)[sP]•[dR](A)[sP]•[dR](T)[sP]• |
| | [LR]([5meC])[sP]•[LR](T)[sP]•[LR](T) |
| 1816_28 | [LR](G)[sP]•[LR](A)[sP]•[dR](A)[sP]•[dR](T)[sP]•[LR]([5meC])[sP]• |
| | [dR](T)[sP]•[LR](T)[sP]•[fR](A)[sP]•[dR](T)[sP]•[dR](T)[sP]• |
| | [dR](T)[sP]•[dR](A)[sP]•[dR](C)[sP]•[dR](A)[sP]•[dR](T)[sP]• |
| | [LR]([5meC])[sP]•[LR](T)[sP]•[LR](T) |
| 1816_29 | [LR](G)[sP]•[LR](A)[sP]•[dR](A)[sP]•[dR](T)[sP]•[LR]([5meC])[sP]• |
| | [dR](T)[sP]•[LR](T)[sP]•[LR](A)[sP]•[dR](T)[sP]•[dR](T)[sP]• |
| | [dR](T)[sP]•[dR](A)[sP]•[dR](C)[sP]•[fR](A)[sP]•[dR](T)[sP]• |
| | [LR]([5meC])[sP]•[LR](T)[sP]•[LR](T) |
| 1816_30 | [LR](G)[sP]•[LR](A)[sP]•[dR](A)[sP]•[dR](T)[sP]•[LR]([5meC])[sP]• |
| | [dR](T)[sP]•[LR](T)[sP]•[LR](A)[sP]•[dR](T)[sP]•[dR](T)[sP]• |
| | [dR](T)[sP]•[dR](A)[sP]•[fR](C)[sP]•[dR](A)[sP]•[dR](T)[sP]• |
| | [LR]([5meC])[sP]•[LR](T)[sP]•[LR](T) |
| 1816_31 | [LR](G)[sP]•[LR](A)[sP]•[dR](A)[sP]•[dR](T)[sP]•[LR]([5meC])[sP]• |
| | [dR](T)[sP]•[LR](T)[sP]•[LR](A)[sP]•[dR](T)[sP]•[dR](T)[sP]• |
| | [dR](T)[sP]•[fR](A)[sP]•[dR](C)[sP]•[dR](A)[sP]•[dR](T)[sP]• |
| | [LR]([5meC])[sP]•[LR](T)[sP]•[LR](T) |
| 1816_32 | [LR](G)[sP]•[LR](A)[sP]•[fR](A)[sP]•[dR](T)[sP]•[LR]([5meC])[sP]• |
| | [dR](T)[sP]•[LR](T)[sP]•[LR](A)[sP]•[dR](T)[sP]•[dR](T)[sP]• |
| | [dR](T)[sP]•[dR](A)[sP]•[dR](C)[sP]•[dR](A)[sP]•[dR](T)[sP]• |
| | [LR]([5meC])[sP]•[LR](T)[sP]•[LR](T) |
| 1816_33 | [LR](G)[sP]•[LR](A)[sP]•[dR](A)[sP]•[dR](T)[sP]•[LR]([5meC])[sP]• |
| | [dR](T)[sP]•[LR](T)[sP]•[LR](A)[sP]•[dR](T)[sP]•[dR](T)[sP]• |
| | [dR](T)[sP]•[dR](A)[sP]•[dR](C)[sP]•[dR](A)[sP]•[LR](T)[sP]• |
| | [LR]([5meC])[sP]•[LR](T)[sP]•[LR](T) |
| 1816_34 | [LR](G)[sP]•[LR](A)[sP]•[dR](A)[sP]•[dR](T)[sP]•[LR]([5meC])[sP]• |
| | [dR](T)[sP]•[LR](T)[sP]•[LR](A)[sP]•[dR](T)[sP]•[dR](T)[sP]• |
| | [dR](T)[sP]•[dR](A)[sP]•[dR](C)[sP]•[LR](A)[sP]•[dR](T)[sP]• |
| | [LR]([5meC])[sP]•[LR](T)[sP]•[LR](T) |
| 1816_35 | [LR](G)[sP]•[LR](A)[sP]•[dR](A)[sP]•[dR](T)[sP]•[LR]([5meC])[sP]• |
| | [dR](T)[sP]•[LR](T)[sP]•[LR](A)[sP]•[dR](T)[sP]•[dR](T)[sP]• |
| | [dR](T)[sP]•[LR](A)[sP]•[dR](C)[sP]•[dR](A)[sP]•[dR](T)[sP]• |
| | [LR]([5meC])[sP]•[LR](T)[sP]•[LR](T) |
| 1816_36 | [LR](G)[sP]•[LR](A)[sP]•[dR](A)[sP]•[dR](T)[sP]•[LR]([5meC])[sP]• |
| | [dR](T)[sP]•[LR](T)[sP]•[LR](A)[sP]•[dR](T)[sP]•[dR](T)[sP]• |
| | [LR](T)[sP]•[dR](A)[sP]•[dR](C)[sP]•[dR](A)[sP]•[dR](T)[sP]• |
| | [LR]([5meC])[sP]•[LR](T)[sP]•[LR](T) |
| 1816_37 | [LR](G)[sP]•[LR](A)[sP]•[dR](A)[sP]•[dR](T)[sP]•[LR]([5meC])[sP]• |
| | [dR](T)[sP]•[LR](T)[sP]•[LR](A)[sP]•[dR](T)[sP]•[LR](T)[sP]• |
| | [dR](T)[sP]•[dR](A)[sP]•[dR](C)[sP]•[dR](A)[sP]•[dR](T)[sP]• |
| | [LR]([5meC])[sP]•[LR](T)[sP]•[LR](T) |
| 1816_38 | [LR](G)[sP]•[LR](A)[sP]•[dR](A)[sP]•[dR](T)[sP]•[LR]([5meC])[sP]• |
| | [dR](T)[sP]•[LR](T)[sP]•[LR](A)[sP]•[LR](T)[sP]•[dR](T)[sP]• |
| | [dR](T)[sP]•[dR](A)[sP]•[dR](C)[sP]•[dR](A)[sP]•[dR](T)[sP]• |
| | [LR]([5meC])[sP]•[LR](T)[sP]•[LR](T) |
| 1816_39 | [LR](G)[sP]•[LR](A)[sP]•[dR](A)[sP]•[dR](T)[sP]•[LR]([5meC])[sP]• |
| | [LR](T)[sP]•[LR](T)[sP]•[LR](A)[sP]•[dR](T)[sP]•[dR](T)[sP]• |
| | [dR](T)[sP]•[dR](A)[sP]•[dR](C)[sP]•[dR](A)[sP]•[dR](T)[sP]• |
| | [LR]([5meC])[sP]•[LR](T)[sP]•[LR](T) |
| 1816_40 | [LR](G)[sP]•[LR](A)[sP]•[dR](A)[sP]•[LR](T)[sP]•[LR]([5meC])[sP]• |
| | [dR](T)[sP]•[LR](T)[sP]•[LR](A)[sP]•[dR](T)[sP]•[dR](T)[sP]• |
| | [dR](T)[sP]•[dR](A)[sP]•[dR](C)[sP]•[dR](A)[sP]•[dR](T)[sP]• |
| | [LR]([5meC])[sP]•[LR](T)[sP]•[LR](T) |
| 1816_41 | [LR](G)[sP]•[LR](A)[sP]•[LR](A)[sP]•[dR](T)[sP]•[LR]([5meC])[sP]• |
| | [dR](T)[sP]•[LR](T)[sP]•[LR](A)[sP]•[dR](T)[sP]•[dR](T)[sP]• |
| | [dR](T)[sP]•[dR](A)[sP]•[dR](C)[sP]•[dR](A)[sP]•[dR](T)[sP]• |
| | [LR]([5meC])[sP]•[LR](T)[sP]•[LR](T) |
| 1816_42 | [LR](G)[sP]•[LR](A)[sP]•[dR](A)[sP]•[dR](T)[sP]•[LR]([5meC])[sP]• |
| | [dR](T)[sP]•[LR](T)[sP]•[LR](A)[sP]•[dR](T)[sP]•[dR](T)[sP]• |
| | [dR](T)[sP]•[dR](A)[sP]•[dR](C)[sP]•[dR](A)[sP]•[dR](T)[sP]• |
| | [LR]([5meC])[sP]•[MOE](T)[sP]•[LR](T) |
| 1816_43 | [LR](G)[sP]•[LR](A)[sP]•[dR](A)[sP]•[dR](T)[sP]•[LR]([5meC])[sP]• |
| | [dR](T)[sP]•[LR](T)[sP]•[LR](A)[sP]•[dR](T)[sP]•[dR](T)[sP]• |
| | [dR](T)[sP]•[dR](A)[sP]•[dR](C)[sP]•[dR](A)[sP]•[dR](T)[sP]• |
| | [MOE]([5meC])[sP]•[LR](T)[sP]•[LR](T) |
| 1816_44 | [LR](G)[sP]•[LR](A)[sP]•[dR](A)[sP]•[dR](T)[sP]•[LR]([5meC])[sP]• |
| | [dR](T)[sP]•[LR](T)[sP]•[LR](A)[sP]•[dR](T)[sP]•[dR](T)[sP]• |
| | [dR](T)[sP]•[dR](A)[sP]•[dR](C)[sP]•[dR](A)[sP]•[MOE](T)[sP]• |
| | [LR]([5meC])[sP]•[LR](T)[sP]•[LR](T) |
| 1816_45 | [LR](G)[sP]•[LR](A)[sP]•[dR](A)[sP]•[dR](T)[sP]•[LR]([5meC])[sP]• |
| | [dR](T)[sP]•[LR](T)[sP]•[LR](A)[sP]•[dR](T)[sP]•[dR](T)[sP]• |
| | [dR](T)[sP]•[dR](A)[sP]•[dR](C)[sP]•[MOE](A)[sP]•[dR](T)[sP]• |
| | [LR]([5meC])[sP]•[LR](T)[sP]•[LR](T) |
| 1816_46 | [LR](G)[sP]•[LR](A)[sP]•[dR](A)[sP]•[dR](T)[sP]•[LR]([5meC])[sP]• |
| | [dR](T)[sP]•[LR](T)[sP]•[LR](A)[sP]•[dR](T)[sP]•[dR](T)[sP]• |
| | [dR](T)[sP]•[MOE](A)[sP]•[dR](C)[sP]•[dR](A)[sP]•[dR](T)[sP]• |
| | [LR]([5meC])[sP]•[LR](T)[sP]•[LR](T) |
| 1816_47 | [LR](G)[sP]•[LR](A)[sP]•[dR](A)[sP]•[dR](T)[sP]•[LR]([5meC])[sP]• |
| | [dR](T)[sP]•[LR](T)[sP]•[LR](A)[sP]•[dR](T)[sP]•[dR](T)[sP]• |
| | [MOE](T)[sP]•[dR](A)[sP]•[dR](C)[sP]•[dR](A)[sP]•[dR](T)[sP]• |
| | [LR]([5meC])[sP]•[LR](T)[sP]•[LR](T) |
| 1816_48 | [LR](G)[sP]•[LR](A)[sP]•[dR](A)[sP]•[dR](T)[sP]•[LR]([5meC])[sP]• |
| | [dR](T)[sP]•[LR](T)[sP]•[LR](A)[sP]•[dR](T)[sP]•[MOE](T)[sP]• |
| | [dR](T)[sP]•[dR](A)[sP]•[dR](C)[sP]•[dR](A)[sP]•[dR](T)[sP]• |
| | [LR]([5meC])[sP]•[LR](T)[sP]•[LR](T) |
| 1816_49 | [LR](G)[sP]•[LR](A)[sP]•[dR](A)[sP]•[dR](T)[sP]•[LR]([5meC])[sP]• |
| | [dR](T)[sP]•[LR](T)[sP]•[LR](A)[sP]•[MOE](T)[sP]•[dR](T)[sP]• |
| | [dR](T)[sP]•[dR](A)[sP]•[dR](C)[sP]•[dR](A)[sP]•[dR](T)[sP]• |
| | [LR]([5meC])[sP]•[LR](T)[sP]•[LR](T) |
| 1816_50 | [LR](G)[sP]•[LR](A)[sP]•[dR](A)[sP]•[dR](T)[sP]•[LR]([5meC])[sP]• |
| | [dR](T)[sP]•[LR](T)[sP]•[MOE](A)[sP]•[dR](T)[sP]•[dR](T)[sP]• |
| | [dR](T)[sP]•[dR](A)[sP]•[dR](C)[sP]•[dR](A)[sP]•[dR](T)[sP]• |
| | [LR]([5meC])[sP]•[LR](T)[sP]•[LR](T) |
| 1816_51 | [LR](G)[sP]•[LR](A)[sP]•[dR](A)[sP]•[dR](T)[sP]•[LR]([5meC])[sP]• |
| | [dR](T)[sP]•[MOE](T)[sP]•[LR](A)[sP]•[dR](T)[sP]•[dR](T)[sP]• |
| | [dR](T)[sP]•[dR](A)[sP]•[dR](C)[sP]•[dR](A)[sP]•[dR](T)[sP]• |
| | [LR]([5meC])[sP]•[LR](T)[sP]•[LR](T) |
| 1816_52 | [LR](G)[sP]•[LR](A)[sP]•[dR](A)[sP]•[dR](T)[sP]•[LR]([5meC])[sP]• |
| | [MOE](T)[sP]•[LR](T)[sP]•[LR](A)[sP]•[dR](T)[sP]•[dR](T)[sP]• |
| | [dR](T)[sP]•[dR](A)[sP]•[dR](C)[sP]•[dR](A)[sP]•[dR](T)[sP]• |
| | [LR]([5meC])[sP]•[LR](T)[sP]•[LR](T) |
| 1816_53 | [LR](G)[sP]•[LR](A)[sP]•[dR](A)[sP]•[dR](T)[sP]•[MOE]([5meC])[sP]• |
| | [dR](T)[sP]•[LR](T)[sP]•[LR](A)[sP]•[dR](T)[sP]•[dR](T)[sP]• |
| | [dR](T)[sP]•[dR](A)[sP]•[dR](C)[sP]•[dR](A)[sP]•[dR](T)[sP]• |
| | [LR]([5meC])[sP]•[LR](T)[sP]•[LR](T) |
| 1816_54 | [LR](G)[sP]•[LR](A)[sP]•[dR](A)[sP]•[MOE](T)[sP]•[LR]([5meC])[sP]• |
| | [dR](T)[sP]•[LR](T)[sP]•[LR](A)[sP]•[dR](T)[sP]•[dR](T)[sP]• |
| | [dR](T)[sP]•[dR](A)[sP]•[dR](C)[sP]•[dR](A)[sP]•[dR](T)[sP]• |
| | [LR]([5meC])[sP]•[LR](T)[sP]•[LR](T) |
| 1816_55 | [LR](G)[sP]•[LR](A)[sP]•[MOE](A)[sP]•[dR](T)[sP]•[LR]([5meC])[sP]• |
| | [dR](T)[sP]•[LR](T)[sP]•[LR](A)[sP]•[dR](T)[sP]•[dR](T)[sP]• |
| | [dR](T)[sP]•[dR](A)[sP]•[dR](C)[sP]•[dR](A)[sP]•[dR](T)[sP]• |
| | [LR]([5meC])[sP]•[LR](T)[sP]•[LR](T) |
| 1816_56 | [LR](G)[sP]•[MOE](A)[sP]•[dR](A)[sP]•[dR](T)[sP]•[LR]([5meC])[sP]• |
| | [dR](T)[sP]•[LR](T)[sP]•[LR](A)[sP]•[dR](T)[sP]•[dR](T)[sP]• |
| | [dR](T)[sP]•[dR](A)[sP]•[dR](C)[sP]•[dR](A)[sP]•[dR](T)[sP]• |
| | [LR]([5meC])[sP]•[LR](T)[sP]•[LR](T) |
| 1816_57 | [LR](G)[sP]•[LR](A)[sP]•[dR](A)[sP]•[dR](T)[sP]•[LR]([5meC])[sP]• |
| | [dR](T)[sP]•[LR](T)[sP]•[LR](A)[sP]•[dR](T)[sP]•[dR](T)[sP]• |
| | [dR](T)[sP]•[dR](A)[sP]•[dR](C)[sP]•[mR](A)[sP]•[dR](T)[sP]• |
| | [LR]([5meC])[sP]•[LR](T)[sP]•[LR](T) |
| 1816_58 | [LR](G)[sP]•[LR](A)[sP]•[dR](A)[sP]•[dR](T)[sP]•[LR]([5meC])[sP]• |
| | [dR](T)[sP]•[LR](T)[sP]•[LR](A)[sP]•[dR](T)[sP]•[dR](T)[sP]• |
| | [dR](T)[sP]•[dR](A)[sP]•[mR](C)[sP]•[dR](A)[sP]•[dR](T)[sP]• |
| | [LR]([5meC])[sP]•[LR](T)[sP]•[LR](T) |
| 1816_59 | [LR](G)[sP]•[LR](A)[sP]•[dR](A)[sP]•[dR](T)[sP]•[LR]([5meC])[sP]• |
| | [dR](T)[sP]•[LR](T)[sP]•[LR](A)[sP]•[dR](T)[sP]•[dR](T)[sP]• |
| | [dR](T)[sP]•[mR](A)[sP]•[dR](C)[sP]•[dR](A)[sP]•[dR](T)[sP]• |
| | [LR]([5meC])[sP]•[LR](T)[sP]•[LR](T) |
| 1816_60 | [LR](G)[sP]•[LR](A)[sP]•[dR](A)[sP]•[dR](T)[sP]•[LR]([5meC])[sP]• |
| | [dR](T)[sP]•[LR](T)[sP]•[mR](A)[sP]•[dR](T)[sP]•[dR](T)[sP]• |
| | [dR](T)[sP]•[dR](A)[sP]•[dR](C)[sP]•[dR](A)[sP]•[dR](T)[sP]• |
| | [LR]([5meC])[sP]•[LR](T)[sP]•[LR](T) |
| 1816_61 | [LR](G)[sP]•[LR](A)[sP]•[mR](A)[sP]•[dR](T)[sP]•[LR]([5meC])[sP]• |
| | [dR](T)[sP]•[LR](T)[sP]•[LR](A)[sP]•[dR](T)[sP]•[dR](T)[sP]• |
| | [dR](T)[sP]•[dR](A)[sP]•[dR](C)[sP]•[dR](A)[sP]•[dR](T)[sP]• |
| | [LR]([5meC])[sP]•[LR](T)[sP]•[LR](T) |
| 1816_62 | [LR](G)[sP]•[mR](A)[sP]•[dR](A)[sP]•[dR](T)[sP]•[LR]([5meC])[sP]• |
| | [dR](T)[sP]•[LR](T)[sP]•[LR](A)[sP]•[dR](T)[sP]•[dR](T)[sP]• |
| | [dR](T)[sP]•[dR](A)[sP]•[dR](C)[sP]•[dR](A)[sP]•[dR](T)[sP]• |
| | [LR]([5meC])[sP]•[LR](T)[sP]•[LR](T) |
| 1816_63 | [LR](G)[sP]•[LR](A)[sP]•[dR](A)[sP]•[dR](T)[sP]•[fR](C)[sP]• |
| | [dR](T)[sP]•[LR](T)[sP]•[LR](A)[sP]•[dR](T)[sP]•[dR](T)[sP]• |
| | [dR](T)[sP]•[dR](A)[sP]•[dR](C)[sP]•[dR](A)[sP]•[dR](T)[sP]• |
| | [LR]([5meC])[sP]•[LR](T)[sP]•[LR](T) |
| 1816_64 | [LR](G)[sP]•[LR](A)[sP]•[dR](A)[sP]•[dR](T)[sP]•[LR]([5meC])[sP]• |
| | [dR](T)[sP]•[LR](T)[sP]•[LR](A)[sP]•[dR](T)[sP]•[dR](T)[sP]• |
| | [dR](T)[sP]•[dR](A)[sP]•[dR](C)[sP]•[dR](A)[sP]•[dR](T)[sP]• |
| | [fR](C)[sP]•[LR](T)[sP]•[LR](T) |
| 1816_65 | [LR](G)[sP]•[LR](A)[sP]•[dR](A)[sP]•[dR](T)[sP]•[LR]([5meC])[sP]• |
| | [dR](T)[sP]•[LR](T)[sP]•[LR](A)[sP]•[dR](T)[sP]•[dR](T)[sP]• |
| | [dR](T)[sP]•[dR](A)[sP]•[dR](C)[sP]•[dR](A)[sP]•[dR](T)[sP]• |
| | [mR](C)[sP]•[LR](T)[sP]•[LR](T) |
| 1816_66 | [LR](G)[sP]•[LR](A)[sP]•[dR](A)[sP]•[dR](T)[sP]•[mR](C)[sP]• |
| | [dR](T)[sP]•[LR](T)[sP]•[LR](A)[sP]•[dR](T)[sP]•[dR](T)[sP]• |
| | [dR](T)[sP]•[dR](A)[sP]•[dR](C)[sP]•[dR](A)[sP]•[dR](T)[sP]• |
| | [LR]([5meC])[sP]•[LR](T)[sP]•[LR](T) |
| 1816_67 | [LR](G)[sP]•[LR](A)[sP]•[dR](A)[sP]•[dR](T)[sP]•[LR]([5meC])[sP]• |
| | [dR](T)[sP]•[fR](U)[sP]•[LR](A)[sP]•[dR](T)[sP]•[dR](T)[sP]• |
| | [dR](T)[sP]•[dR](A)[sP]•[dR](C)[sP]•[dR](A)[sP]•[dR](T)[sP]• |
| | [LR]([5meC])[sP]•[LR](T)[sP]•[LR](T) |
| 1816_68 | [LR](G)[sP]•[LR](A)[sP]•[dR](A)[sP]•[dR](T)[sP]•[LR]([5meC])[sP]• |
| | [dR](T)[sP]•[LR](T)[sP]•[LR](A)[sP]•[dR](T)[sP]•[dR](T)[sP]• |
| | [dR](T)[sP]•[dR](A)[sP]•[dR](C)[sP]•[dR](A)[sP]•[dR](T)[sP]• |
| | [LR]([5meC])[sP]•[fR](U)[sP]•[LR](T) |
| 1816_69 | [LR](G)[sP]•[LR](A)[sP]•[dR](A)[sP]•[dR](T)[sP]•[LR]([5meC])[sP]• |
| | [dR](T)[sP]•[LR](T)[sP]•[LR](A)[sP]•[dR](T)[sP]•[dR](T)[sP]• |
| | [dR](T)[sP]•[dR](A)[sP]•[dR](C)[sP]•[dR](A)[sP]•[fR](U)[sP]• |
| | [LR]([5meC])[sP]•[LR](T)[sP]•[LR](T) |
| 1816_70 | [LR](G)[sP]•[LR](A)[sP]•[dR](A)[sP]•[dR](T)[sP]•[LR]([5meC])[sP]• |
| | [dR](T)[sP]•[LR](T)[sP]•[LR](A)[sP]•[dR](T)[sP]•[dR](T)[sP]• |
| | [fR](U)[sP]•[dR](A)[sP]•[dR](C)[sP]•[dR](A)[sP]•[dR](T)[sP]• |
| | [LR]([5meC])[sP]•[LR](T)[sP]•[LR](T) |
| 1816_71 | [LR](G)[sP]•[LR](A)[sP]•[dR](A)[sP]•[dR](T)[sP]•[LR]([5meC])[sP]• |
| | [dR](T)[sP]•[LR](T)[sP]•[LR](A)[sP]•[dR](T)[sP]•[fR](U)[sP]• |
| | [dR](T)[sP]•[dR](A)[sP]•[dR](C)[sP]•[dR](A)[sP]•[dR](T)[sP]• |
| | [LR]([5meC])[sP]•[LR](T)[sP]•[LR](T) |
| 1816_72 | [LR](G)[sP]•[LR](A)[sP]•[dR](A)[sP]•[dR](T)[sP]•[LR]([5meC])[sP]• |
| | [dR](T)[sP]•[LR](T)[sP]•[LR](A)[sP]•[fR](U)[sP]•[dR](T)[sP]• |
| | [dR](T)[sP]•[dR](A)[sP]•[dR](C)[sP]•[dR](A)[sP]•[dR](T)[sP]• |
| | [LR]([5meC])[sP]•[LR](T)[sP]•[LR](T) |
| 1816_73 | [LR](G)[sP]•[LR](A)[sP]•[dR](A)[sP]•[dR](T)[sP]•[LR]([5meC])[sP]• |
| | [fR](U)[sP]•[LR](T)[sP]•[LR](A)[sP]•[dR](T)[sP]•[dR](T)[sP]• |
| | [dR](T)[sP]•[dR](A)[sP]•[dR](C)[sP]•[dR](A)[sP]•[dR](T)[sP]• |
| | [LR]([5meC])[sP]•[LR](T)[sP]•[LR](T) |
| 1816_74 | [LR](G)[sP]•[LR](A)[sP]•[dR](A)[sP]•[fR](U)[sP]•[LR]([5meC])[sP]• |
| | [dR](T)[sP]•[LR](T)[sP]•[LR](A)[sP]•[dR](T)[sP]•[dR](T)[sP]• |
| | [dR](T)[sP]•[dR](A)[sP]•[dR](C)[sP]•[dR](A)[sP]•[dR](T)[sP]• |
| | [LR]([5meC])[sP]•[LR](T)[sP]•[LR](T) |
| 1816_75 | [LR](G)[sP]•[LR](A)[sP]•[dR](A)[sP]•[dR](T)[sP]•[LR]([5meC])[sP]• |
| | [dR](T)[sP]•[LR](T)[sP]•[LR](A)[MOPO]•[dR](T)[sP]•[dR](T)[sP]• |
| | [dR](T)[sP]•[dR](A)[sP]•[dR](C)[sP]•[dR](A)[sP]•[dR](T)[sP]• |
| | [LR]([5meC])[sP]•[LR](T)[sP]•[LR](T) |
| 1816_76 | [LR](G)[sP]•[LR](A)[sP]•[dR](A)[sP]•[dR](T)[sP]•[LR]([5meC])[sP]• |
| | [dR](T)[sP]•[LR](T)[sP]•[LR](A)[sP]•[dR](T)[MOPO]•[dR](T)[sP]• |
| | [dR](T)[sP]•[dR](A)[sP]•[dR](C)[sP]•[dR](A)[sP]•[dR](T)[sP]• |
| | [LR]([5meC])[sP]•[LR](T)[sP]•[LR](T) |
| 1816_77 | [LR](G)[sP]•[LR](A)[sP]•[dR](A)[sP]•[dR](T)[sP]•[LR]([5meC])[sP]• |
| | [dR](T)[sP]•[LR](T)[sP]•[LR](A)[sP]•[dR](T)[sP]•[dR](T)[MOPO]• |
| | [dR](T)[sP]•[dR](A)[sP]•[dR](C)[sP]•[dR](A)[sP]•[dR](T)[sP]• |
| | [LR]([5meC])[sP]•[LR](T)[sP]•[LR](T) |
| 1816_78 | [LR](G)[sP]•[LR](A)[sP]•[dR](A)[sP]•[dR](T)[sP]•[LR]([5meC])[sP]• |
| | [dR](T)[sP]•[LR](T)[sP]•[LR](A)[sP]•[dR](T)[sP]•[dR](T)[sP]• |
| | [dR](T)[MOPO]•[dR](A)[sP]•[dR](C)[sP]•[dR](A)[sP]•[dR](T)[sP]• |
| | [LR]([5meC])[sP]•[LR](T)[sP]•[LR](T) |
| 1816_79 | [LR](G)[sP]•[LR](A)[sP]•[dR](A)[sP]•[dR](T)[sP]•[LR]([5meC])[sP]• |
| | [dR](T)[sP]•[LR](T)[sP]•[LR](A)[sP]•[dR](T)[sP]•[dR](T)[sP]• |
| | [dR](T)[sP]•[dR](A)[MOPO]•[dR](C)[sP]•[dR](A)[sP]•[dR](T)[sP]• |
| | [LR]([5meC])[sP]•[LR](T)[sP]•[LR](T) |
| 1816_80 | [LR](G)[sP]•[LR](A)[sP]•[dR](A)[sP]•[dR](T)[sP]•[LR]([5meC])[sP]• |
| | [dR](T)[sP]•[LR](T)[sP]•[LR](A)[sP]•[dR](T)[sP]•[dR](T)[sP]• |
| | [dR](T)[sP]•[dR](A)[sP]•[dR](C)[MOPO]•[dR](A)[sP]•[dR](T)[sP]• |
| | [LR]([5meC])[sP]•[LR](T)[sP]•[LR](T) |
| 1816_81 | [LR](G)[sP]•[LR](A)[sP]•[dR](A)[sP]•[dR](T)[sP]•[LR]([5meC])[sP]• |
| | [dR](T)[sP]•[LR](T)[sP]•[LR](A)[sP]•[dR](T)[sP]•[dR](T)[sP]• |
| | [dR](T)[sP]•[dR](A)[sP]•[dR](C)[sP]•[dR](A)[MOPO]•[dR](T)[sP]• |
| | [LR]([5meC])[sP]•[LR](T)[sP]•[LR](T) |
| 1816_82 | [LR](G)[sP]•[LR](A)[sP]•[dR](A)[sP]•[dR](T)[sP]•[LR]([5meC])[sP]• |
| | [dR](T)[sP]•[LR](T)[sP]•[LR](A)[sP]•[dR](T)[sP]•[dR](T)[sP]• |
| | [dR](T)[sP]•[dR](A)[sP]•[dR](C)[sP]•[dR](A)[sP]•[dR](T)[MOPO]• |
| | [LR]([5meC])[sP]•[LR](T)[sP]•[LR](T) |
| 1816_83 | [LR](G)[sP]•[LR](A)[sP]•[dR](A)[sP]•[dR](T)[sP]•[LR]([5meC])[sP]• |
| | [dR](T)[sP]•[LR](T)[sP]•[LR](A)[sP]•[dR](T)[sP]•[dR](T)[sP]• |
| | [dR](T)[sP]•[dR](A)[sP]•[dR](C)[sP]•[dR](A)[sP]•[dR](T)[sP]• |
| | [LR]([5meC])[MOPO]•[LR](T)[sP]•[LR](T) |
| 1816_84 | [LR](G)[sP]•[LR](A)[sP]•[dR](A)[sP]•[dR](T)[sP]•[LR]([5meC])[sP]• |
| | [dR](T)[sP]•[LR](T)[sP]•[LR](A)[MOPS]•[dR](T)[sP]•[dR](T)[sP]• |
| | [dR](T)[sP]•[dR](A)[sP]•[dR](C)[sP]•[dR](A)[sP]•[dR](T)[sP]• |
| | [LR]([5meC])[sP]•[LR](T)[sP]•[LR](T) |
| 1816_85 | [LR](G)[sP]•[LR](A)[sP]•[dR](A)[sP]•[dR](T)[sP]•[LR]([5meC])[sP]• |
| | [dR](T)[sP]•[LR](T)[sP]•[LR](A)[sP]•[dR](T)[MOPS]•[dR](T)[sP]• |
| | [dR](T)[sP]•[dR](A)[sP]•[dR](C)[sP]•[dR](A)[sP]•[dR](T)[sP]• |
| | [LR]([5meC])[sP]•[LR](T)[sP]•[LR](T) |
| 1816_86 | [LR](G)[sP]•[LR](A)[sP]•[dR](A)[sP]•[dR](T)[sP]•[LR]([5meC])[sP]• |
| | [dR](T)[sP]•[LR](T)[sP]•[LR](A)[sP]•[dR](T)[sP]•[dR](T)[MOPS]• |
| | [dR](T)[sP]•[dR](A)[sP]•[dR](C)[sP]•[dR](A)[sP]•[dR](T)[sP]• |
| | [LR]([5meC])[sP]•[LR](T)[sP]•[LR](T) |
| 1816_87 | [LR](G)[sP]•[LR](A)[sP]•[dR](A)[sP]•[dR](T)[sP]•[LR]([5meC])[sP]• |
| | [dR](T)[sP]•[LR](T)[sP]•[LR](A)[sP]•[dR](T)[sP]•[dR](T)[sP]• |
| | [dR](T)[MOPS]•[dR](A)[sP]•[dR](C)[sP]•[dR](A)[sP]•[dR](T)[sP]• |
| | [LR]([5meC])[sP]•[LR](T)[sP]•[LR](T) |
| 1816_88 | [LR](G)[sP]•[LR](A)[sP]•[dR](A)[sP]•[dR](T)[sP]•[LR]([5meC])[sP]• |
| | [dR](T)[sP]•[LR](T)[sP]•[LR](A)[sP]•[dR](T)[sP]•[dR](T)[sP]• |
| | [dR](T)[sP]•[dR](A)[MOPS]•[dR](C)[sP]•[dR](A)[sP]•[dR](T)[sP]• |
| | [LR]([5meC])[sP]•[LR](T)[sP]•[LR](T) |
| 1816_89 | [LR](G)[sP]•[LR](A)[sP]•[dR](A)[sP]•[dR](T)[sP]•[LR]([5meC])[sP]• |
| | [dR](T)[sP]•[LR](T)[sP]•[LR](A)[sP]•[dR](T)[sP]•[dR](T)[sP]• |
| | [dR](T)[sP]•[dR](A)[sP]•[dR](C)[MOPS]•[dR](A)[sP]•[dR](T)[sP]• |
| | [LR]([5meC])[sP]•[LR](T)[sP]•[LR](T) |
| 1816_90 | [LR](G)[sP]•[LR](A)[sP]•[dR](A)[sP]•[dR](T)[sP]•[LR]([5meC])[sP]• |
| | [dR](T)[sP]•[LR](T)[sP]•[LR](A)[sP]•[dR](T)[sP]•[dR](T)[sP]• |
| | [dR](T)[sP]•[dR](A)[sP]•[dR](C)[sP]•[dR](A)[MOPS]•[dR](T)[sP]• |
| | [LR]([5meC])[sP]•[LR](T)[sP]•[LR](T) |
| 1816_91 | [LR](G)[sP]•[LR](A)[sP]•[dR](A)[sP]•[dR](T)[sP]•[LR]([5meC])[sP]• |
| | [dR](T)[sP]•[LR](T)[sP]•[LR](A)[sP]•[dR](T)[sP]•[dR](T)[sP]• |
| | [dR](T)[sP]•[dR](A)[sP]•[dR](C)[sP]•[dR](A)[sP]•[dR](T)[MOPS]• |
| | [LR]([5meC])[sP]•[LR](T)[sP]•[LR](T) |
| 1816_92 | [LR](G)[sP]•[LR](A)[sP]•[dR](A)[sP]•[dR](T)[sP]•[LR]([5meC])[sP]• |
| | [dR](T)[sP]•[LR](T)[sP]•[LR](A)[sP]•[dR](T)[sP]•[dR](T)[sP]• |
| | [dR](T)[sP]•[dR](A)[sP]•[dR](C)[sP]•[dR](A)[sP]•[dR](T)[sP]• |
| | [LR]([5meC])[MOPS]•[LR](T)[sP]•[LR](T) |

### Example 14: Testing In Vitro Efficacy of LNA Oligonucleotides in iCell® GlutaNeurons at 1.25 μM and 62.5 nM

### Materials and Methods:

[0511] The compounds of the redesign library described in Table 11 of Example 13 were evaluated for potency in human iPSC cells using two concentrations; 1.25 μM and 62.5 nM, comparing the effect on the ATXN3 transcript and the KCNB2 transcript at both concentrations.

[0512] The iCell GlutaNeuron cells were prepared and maintained essentially as described in Example 5 & Table 2. 96-well cell culture plates were coated with Poly-L-Omithine (0.01%) (Sigma-P4957), 100p/well for 4 hours. Rinsed 3 times with PBS and coated with Laminin (Roche Diagnostic, 11243217001) 0.5 mg/ml diluted 1:500 in PBS overnight at 4 degrees Celsius. The cells were treated and maintained as per recommendation by the vendor using the provided protocol: iCell® GlutaNeurons, User's Guide, Document ID: X1005, Version 1.2, Cellular Dynamics, Fujifilm; available at https: address cdn.stemcell.com/media/files/manual/MADX1005-icell_glutaneurons_users_guide.pdf (accessed on e.g. 10 Nov. 2020). Compounds were added to the cells from pre-dilution plates (compound diluted in PBS) to reach the desired final concentration. RNA purification and qPCR were performed as described in Example 2; however, using the qPCR assays described below for analysis.

Human KCNB2 pre-mRNA using the qPCR assay: “Hs.PT.58.39309562”,
PrimeTime ® XL qPCR Assay (Integrated DNA Technologies (IDT), Leuven, Belgium)
Probe:
(SEQ ID NO: 1989)
5′-/56-FAM/AGA AAC CTA/ZEN/ACT CAT CAG TGG CTG CAA/3IABkFQ/-3′
Primer 1:
(SEQ ID NO: 1990)
5′-GAA CAG GAT AGA CAC GAT GGC-3′
Primer 2:
(SEQ ID NO: 1991)
5′-AGA GAC TAT GCG AGA GCG A-3′
Human ATXN3 pre-mRNA using the qPCR assay: costum design “(ATXN3_exon_8-9(1)”,
PrimeTime ® XL qPCR Assay (IDT).
Probe:
(SEQ ID NO: 1134)
5′-/56-FAM/CTCCGCAGG/ZEN/GCT ATTCAGCT AAGT/3IABkFQ/-3′
Primer 1:
(SEQ ID NO: 1135)
5′-AGT AAGATTTGT ACCTGATGTCTGT-3′
Primer 2:
(SEQ ID NO: 1136)
5′-CATGGAAGATGAGGAAGCAGAT-3′
Human TBP pre-mRNA using the qPCR assay: “Hs.PT.58v.39858774”, PrimeTime ®
XL qPCR Assay (IDT)
Probe:
(SEQ ID NO: 1131)
5′-/5HEX/TGA TCT TTG/ZEN/CAG TGA CCC AGC ATC A/3IABkFQ/-3′
Primer 1:
(SEQ ID NO: 1132)
5′-GCT GTT TAA CTT CGC TTC CG-3′
Primer 2:
(SEQ ID NO: 1133)
5′-CAG CAA CTT CCT CAA TTC CTT G-3′

### Results:

[0513] The results from this screen is presented in Table 12 as the level of remaining transcript with values given in percent (%) relative to untreated cells, i.e. low level means efficient knockdown. This was done for each of the applied concentrations for each of the two target genes (ATXN3 and KCNB2). Most of the tested compounds showed efficacious knockdown of the ATXN3 transcript at both concentrations used. The effect on the KCNB2 transcript was variable.

TABLE 12

| | 1.25 uM (% | 62.5 nM (% | 1.25 uM (% | 62.5 nM (% |
|---|---|---|---|---|
| | ATXN3 | ATXN3 | KCNB2 | KCNB2 |
| CMP ID | mRNA | mRNA | mRNA | mRNA |
| NO | remaining) | remaining) | remaining) | remaining) |
| 1122_33 | 14.84 | 41.69 | 66.57 | 88.67 |
| 1122_67 | 15.03 | 39.41 | 9.93 | 59.09 |
| 1122_82 | 18.29 | 50.93 | 17.61 | 73.26 |
| 1122_83 | 18.12 | 54.07 | 84.73 | 96.23 |
| 1122_84 | 12.59 | 40.95 | 27.66 | 74.71 |
| 1122_85 | 15.13 | 40.70 | 23.47 | 82.11 |
| 1122_86 | 16.64 | 53.29 | 75.13 | 113.41 |
| 1122_87 | 13.46 | 35.67 | 19.90 | 69.29 |
| 1122_88 | 12.85 | 34.25 | 24.41 | 68.38 |
| 1122_89 | 16.45 | 46.10 | 38.00 | 75.09 |
| 1122_90 | 18.52 | 50.88 | 60.64 | 93.90 |
| 1122_91 | 17.83 | 45.26 | 35.19 | 86.04 |
| 1122_92 | 15.49 | 41.46 | 21.27 | 68.79 |
| 1122_93 | 65.98 | 89.20 | 90.58 | 103.35 |
| 1122_94 | 63.83 | 92.70 | 82.15 | 98.30 |
| 1122_95 | 15.40 | 35.25 | 6.65 | 49.08 |
| 1122_96 | 16.51 | 44.63 | 2.69 | 48.45 |
| 1122_97 | 37.79 | 65.35 | 42.78 | 75.62 |
| 1122_98 | 14.34 | 38.27 | 0.91 | 42.75 |
| 1122_99 | 33.48 | 58.08 | 25.62 | 69.29 |
| 1122_100 | 12.21 | 31.92 | 0.85 | 44.41 |
| 1122_101 | 15.41 | 46.59 | 60.45 | 90.56 |
| 1122_102 | 15.62 | 41.71 | 16.98 | 62.88 |
| 1122_103 | 14.11 | 37.53 | 2.61 | 46.87 |
| 1122_104 | 18.01 | 47.10 | 36.56 | 81.02 |
| 1122_105 | 18.20 | 43.65 | 19.99 | 74.46 |
| 1122_106 | 16.64 | 36.77 | 7.75 | 55.14 |
| 1122_107 | 14.84 | 41.59 | 32.47 | 69.47 |
| 1122_108 | 12.89 | 32.26 | 8.10 | 72.49 |
| 1122_109 | 15.35 | 35.47 | 2.01 | 57.70 |
| 1122_110 | 19.02 | 45.56 | 0.72 | 45.61 |
| 1122_111 | 55.00 | 73.98 | 36.41 | 88.13 |
| 1122_112 | 16.38 | 40.70 | 0.77 | 50.17 |
| 1122_113 | 29.42 | 56.92 | 17.68 | 60.51 |
| 1122_114 | 13.63 | 33.67 | 0.43 | 42.62 |
| 1122_115 | 18.86 | 46.13 | 57.49 | 98.41 |
| 1122_116 | 31.73 | 59.42 | 28.44 | 86.09 |
| 1122_117 | 26.55 | 55.77 | 10.27 | 67.46 |
| 1122_118 | 49.24 | 68.77 | 52.70 | 88.13 |
| 1122_119 | 19.51 | 44.68 | 9.36 | 60.99 |
| 1122_120 | 16.50 | 40.36 | 2.16 | 51.59 |
| 1122_121 | 16.61 | 40.45 | 5.55 | 56.34 |
| 1122_123 | 15.49 | 38.63 | 0.95 | 52.77 |
| 1122_124 | 28.90 | 54.57 | 17.31 | 68.48 |
| 1122_125 | 15.75 | 41.51 | 12.29 | 63.50 |
| 1122_126 | 15.68 | 44.30 | 9.96 | 63.90 |
| 1122_127 | 14.91 | 45.71 | 9.92 | 55.07 |
| 1122_128 | 18.12 | 46.12 | 20.98 | 79.79 |
| 1122_129 | 15.62 | 44.07 | 9.19 | 69.22 |
| 1122_130 | 14.90 | 43.91 | 8.27 | 68.50 |
| 1122_131 | 17.75 | 46.92 | 20.03 | 67.67 |
| 1122_132 | 17.93 | 41.86 | 8.22 | 72.39 |
| 1122_133 | 18.11 | 47.91 | 14.60 | 78.23 |
| 1122_134 | 17.42 | 48.52 | 14.02 | 61.73 |
| 1122_135 | 14.62 | 46.43 | 3.71 | 52.73 |
| 1122_136 | 16.28 | 35.03 | 8.48 | 56.82 |
| 1122_137 | 14.92 | 37.45 | 12.42 | 65.30 |
| 1122_138 | 14.40 | 37.58 | 14.48 | 63.64 |
| 1122_139 | 15.06 | 38.30 | 14.21 | 66.30 |
| 1122_140 | 14.40 | 37.78 | 18.42 | 63.01 |
| 1122_141 | 16.19 | 37.64 | 16.31 | 64.03 |
| 1122_142 | 15.90 | 40.17 | 15.61 | 61.47 |
| 1122_143 | 14.70 | 103.24 | 12.58 | 109.05 |
| 1122_144 | 15.85 | 38.70 | 24.26 | 63.50 |
| 1122_145 | 14.15 | 36.53 | 13.02 | 67.51 |
| 1122_146 | 15.95 | 38.11 | 20.70 | 69.38 |
| 1122_147 | 15.08 | 40.89 | 19.48 | 62.04 |
| 1122_148 | 17.05 | 37.47 | 15.74 | 57.67 |
| 1122_149 | 15.43 | 35.40 | 43.92 | 78.04 |
| 1122_150 | 14.10 | 34.07 | 43.11 | 82.00 |
| 1122_151 | 15.65 | 37.73 | 48.08 | 92.95 |
| 1122_152 | 13.89 | 33.97 | 32.02 | 83.04 |
| 1122_153 | 13.97 | 35.53 | 40.47 | 82.39 |
| 1122_154 | 13.75 | 34.07 | 35.44 | 86.80 |
| 1122_155 | 14.15 | 43.77 | 43.08 | 83.80 |
| 1122_156 | 15.13 | 37.99 | 44.64 | 87.46 |
| 1122_157 | 14.34 | 40.19 | 57.37 | 88.72 |
| 1122_158 | 13.68 | 35.71 | 42.68 | 80.61 |
| 1122_159 | 15.47 | 40.55 | 57.30 | 86.78 |
| 1122_160 | 13.51 | 38.20 | 36.47 | 80.75 |
| 1122_161 | 15.52 | 42.53 | 10.78 | 64.30 |
| 1122_162 | 16.08 | 46.05 | 43.50 | 90.89 |
| 1122_163 | 17.28 | 45.49 | 42.75 | 86.76 |
| 1122_164 | 33.44 | 63.29 | 64.52 | 94.34 |
| 1122_165 | 29.00 | 63.38 | 67.97 | 84.55 |
| 1122_166 | 16.50 | 50.60 | 37.71 | 85.58 |
| 1122_167 | 12.92 | 42.08 | 37.91 | 76.46 |
| 1122_168 | 17.21 | 53.77 | 74.23 | 98.46 |
| 1122_169 | 13.00 | 41.35 | 17.57 | 69.24 |
| 1122_170 | 15.62 | 48.53 | 71.05 | 92.86 |
| 1122_171 | 12.95 | 35.94 | 10.80 | 59.51 |
| 1122_172 | 14.15 | 40.39 | 30.00 | 76.26 |
| 1122_173 | 16.04 | 48.13 | 50.42 | 95.73 |
| 1122_174 | 16.06 | 46.62 | 27.28 | 75.84 |
| 1122_175 | 17.19 | 41.23 | 44.35 | 89.61 |
| 1122_176 | 12.72 | 38.58 | 24.65 | 74.88 |
| 1122_177 | 43.57 | 68.03 | 56.40 | 78.38 |
| 1122_178 | 18.39 | 48.85 | 7.77 | 60.36 |
| 1122_179 | 12.21 | 36.54 | 0.66 | 39.24 |
| 1122_180 | 11.41 | 29.30 | 2.53 | 50.10 |
| 1122_181 | 11.39 | 29.60 | 1.37 | 45.39 |
| 1122_182 | 11.91 | 33.43 | 1.00 | 38.58 |
| 1122_183 | 15.53 | 53.20 | 70.04 | 89.74 |
| 1122_184 | 18.29 | 50.25 | 71.87 | 94.73 |
| 1122_185 | 12.42 | 38.65 | 16.98 | 64.32 |
| 1122_186 | 15.43 | 35.73 | 0.60 | 38.92 |
| 1122_188 | 95.10 | 91.87 | 98.34 | 92.17 |
| 1122_189 | 13.17 | 45.93 | 42.56 | 81.86 |
| 1122_190 | 88.24 | 96.08 | 101.92 | 93.17 |
| 1122_191 | 17.43 | 47.23 | 35.22 | 84.24 |
| 1122_192 | 14.50 | 41.74 | 2.75 | 47.15 |
| 1122_193 | 17.94 | 45.59 | 16.35 | 70.52 |
| 1122_194 | 19.14 | 42.96 | 2.51 | 44.63 |
| 1122_195 | 15.03 | 41.04 | 6.84 | 58.60 |
| 1122_196 | 14.86 | 39.28 | 0.98 | 47.63 |
| 1122_197 | 14.80 | 39.13 | 0.62 | 45.40 |
| 1122_198 | 23.68 | 54.40 | 20.87 | 71.13 |
| 1122_199 | 22.98 | 50.51 | 18.55 | 67.76 |
| 1122_200 | 23.58 | 50.62 | 37.86 | 81.81 |
| 1122_201 | 19.40 | 46.35 | 7.15 | 59.27 |
| 1122_202 | 18.20 | 46.98 | 5.78 | 54.72 |
| 1122_203 | 17.69 | 45.67 | 2.10 | 48.19 |
| 1122_204 | 13.49 | 37.08 | 0.50 | 43.42 |
| 1122_205 | 115.04 | 44.88 | 5.19 | 83.93 |
| 1122_206 | 12.85 | 35.68 | 1.05 | 52.13 |
| 1122_207 | 16.58 | 45.34 | 58.08 | 97.54 |
| 1122_208 | 17.59 | 47.72 | 13.12 | 61.52 |
| 1122_209 | 18.16 | 44.97 | 35.65 | 72.69 |
| 1122_210 | 17.36 | 47.09 | 30.36 | 68.94 |
| 1122_211 | 19.96 | 46.56 | 20.87 | 72.34 |
| 1122_212 | 24.09 | 54.75 | 49.10 | 83.35 |
| 1122_213 | 18.37 | 48.15 | 27.49 | 74.55 |
| 1122_214 | 14.29 | 39.30 | 15.92 | 66.14 |
| 1122_215 | 15.37 | 38.56 | 2.04 | 41.18 |
| 1122_216 | 15.01 | 42.66 | 7.02 | 58.95 |
| 1122_217 | 17.30 | 46.90 | 32.59 | 82.10 |
| 1122_218 | 13.77 | 42.95 | 25.43 | 71.68 |
| 1122_219 | 12.87 | 37.59 | 17.95 | 52.45 |
| 1122_220 | 13.52 | 38.61 | 1.85 | 48.48 |
| 1122_221 | 18.36 | 45.47 | 29.00 | 75.06 |
| 1122_222 | 23.95 | 54.80 | 19.25 | 67.91 |
| 1122_223 | 19.96 | 48.20 | 33.50 | 74.16 |
| 1122_224 | 68.09 | 95.88 | 81.06 | 104.47 |
| 1122_225 | 31.31 | 66.62 | 53.44 | 90.70 |
| 1122_226 | 102.33 | 93.40 | 96.03 | 101.72 |
| 1122_227 | 17.68 | 49.92 | 63.44 | 98.06 |
| 1122_228 | 12.94 | 28.36 | 0.52 | 40.67 |
| 1122_229 | 13.82 | 36.60 | 25.36 | 83.32 |
| 1122_230 | 13.78 | 29.77 | 1.16 | 53.35 |
| 1122_231 | 13.75 | 34.55 | 14.04 | 67.82 |
| 1122_232 | 12.79 | 33.53 | 16.70 | 73.24 |
| 1122_233 | 11.52 | 28.88 | 0.67 | 39.96 |
| 1122_234 | 12.10 | 29.35 | 0.12 | 30.89 |
| 1122_235 | 10.75 | 31.37 | 1.35 | 45.12 |
| 1122_236 | 15.54 | 36.00 | 19.38 | 78.46 |
| 1122_237 | 14.85 | 38.11 | 20.56 | 76.35 |
| 1122_238 | 98.98 | 100.70 | 93.56 | 109.21 |
| 1122_239 | 18.93 | 56.23 | 59.59 | 93.71 |
| 1122_240 | 14.80 | 38.69 | 0.90 | 42.40 |
| 1122_241 | 15.37 | 46.65 | 20.38 | 66.87 |
| 1122_242 | 15.24 | 42.10 | 13.87 | 68.39 |
| 1122_243 | 15.73 | 44.21 | 14.67 | 66.50 |
| 1122_244 | 14.11 | 40.27 | 0.86 | 39.99 |
| 1122_245 | 13.14 | 33.83 | 0.38 | 39.46 |
| 1122_247 | 12.86 | 33.71 | 0.90 | 43.55 |
| 1122_248 | 90.91 | 95.53 | 106.59 | 91.46 |
| 1122_249 | 14.22 | 41.84 | 40.90 | 87.00 |
| 1122_250 | 90.31 | 100.03 | 100.46 | 97.45 |
| 1122_251 | 102.82 | 102.41 | 98.63 | 99.26 |
| 1122_252 | 16.50 | 48.66 | 38.13 | 85.83 |
| 1122_253 | 17.79 | 48.73 | 31.96 | 79.20 |
| 1122_254 | 16.26 | 46.83 | 26.68 | 70.97 |
| 1122_255 | 16.23 | 39.36 | 1.22 | 48.88 |
| 1122_256 | 18.48 | 44.91 | 7.37 | 62.07 |
| 1122_257 | 18.72 | 43.81 | 1.85 | 49.52 |
| 1122_258 | 28.90 | 59.55 | 22.76 | 80.32 |
| 1122_259 | 13.02 | 35.53 | 0.27 | 37.49 |
| 1122_260 | 39.03 | 64.19 | 25.97 | 75.30 |
| 1122_261 | 25.96 | 54.58 | 4.80 | 54.40 |
| 1122_262 | 64.09 | 79.15 | 48.38 | 86.81 |
| 1122_263 | 41.44 | 64.92 | 14.48 | 60.49 |
| 1122_264 | 31.93 | 53.80 | 8.86 | 57.82 |
| 1122_265 | 21.30 | 46.83 | 1.90 | 48.70 |
| 1122_266 | 12.74 | 38.89 | 0.38 | 39.26 |
| 1122_267 | 13.34 | 34.60 | 0.35 | 35.53 |
| 1122_268 | 21.75 | 52.36 | 45.71 | 88.45 |
| 1122_269 | 15.62 | 34.21 | 0.99 | 42.01 |
| 1122_270 | 18.23 | 48.08 | 55.25 | 92.41 |
| 1122_271 | 29.49 | 58.90 | 12.49 | 74.08 |
| 1122_272 | 22.71 | 53.62 | 17.96 | 86.69 |
| 1122_273 | 30.84 | 63.97 | 39.74 | 79.91 |
| 1122_274 | 25.06 | 55.33 | 14.72 | 72.24 |
| 1122_275 | 46.36 | 77.28 | 49.33 | 91.76 |
| 1122_276 | 22.07 | 52.96 | 22.13 | 75.39 |
| 1122_277 | 24.76 | 52.41 | 2.80 | 104.85 |
| 1122_278 | 16.09 | 39.55 | 1.05 | 53.39 |
| 1122_279 | 16.97 | 41.64 | 2.59 | 53.82 |
| 1122_280 | 19.16 | 47.62 | 53.88 | 89.20 |
| 1122_281 | 15.33 | 35.15 | 1.21 | 49.25 |
| 1122_282 | 18.74 | 46.47 | 19.18 | 70.60 |
| 1122_283 | 14.21 | 38.75 | 0.92 | 49.39 |
| 1122_284 | 21.36 | 50.04 | 17.88 | 77.20 |
| 1122_285 | 24.58 | 53.16 | 11.30 | 69.32 |
| 1122_286 | 26.61 | 59.28 | 32.18 | 85.20 |
| 1122_287 | 19.11 | 46.43 | 40.68 | 87.49 |
| 1122_288 | 17.38 | 46.11 | 29.23 | 83.51 |
| 1122_289 | 22.65 | 50.00 | 18.22 | 80.28 |
| 1122_290 | 15.73 | 46.26 | 46.94 | 97.94 |
| 1122_291 | 17.59 | 47.83 | 57.89 | 97.49 |
| 1122_292 | 18.87 | 45.34 | 51.24 | 76.10 |
| 1122_293 | 19.91 | 50.35 | 80.98 | 93.18 |
| 1122_294 | 15.68 | 44.72 | 63.82 | 89.72 |
| 1122_295 | 17.72 | 46.95 | 72.65 | 97.04 |
| 1122_296 | 18.22 | 45.33 | 84.64 | 65.09 |
| 1122_297 | 21.12 | 52.34 | 55.13 | 90.63 |
| 1122_298 | 19.04 | 49.85 | 43.05 | 83.36 |
| 1122_299 | 21.00 | 53.98 | 52.09 | 88.91 |
| 1122_300 | 21.03 | 56.31 | 63.83 | 96.36 |
| 1122_301 | 15.75 | 41.51 | 15.41 | 71.45 |
| 1122_302 | 15.98 | 41.88 | 33.75 | 82.19 |
| 1122_303 | 14.92 | 33.22 | 16.97 | 73.97 |
| 1122_304 | 12.17 | 33.01 | 0.96 | 54.41 |
| 1122_305 | 17.66 | 38.97 | 1.49 | 58.34 |
| 1122_306 | 18.52 | 42.72 | 3.38 | 58.51 |
| 1122_307 | 42.52 | 62.86 | 49.15 | 83.10 |
| 1122_308 | 15.75 | 46.33 | 18.59 | 81.21 |
| 1122_309 | 18.69 | 46.63 | 43.91 | 88.58 |
| 1122_310 | 21.63 | 49.10 | 64.20 | 92.07 |
| 1122_311 | 15.23 | 36.71 | 0.82 | 55.64 |
| 1122_312 | 16.28 | 40.30 | 14.72 | 71.61 |
| 1122_313 | 17.13 | 42.41 | 26.14 | 78.29 |
| 1122_314 | 17.15 | 44.16 | 17.44 | 74.43 |
| 1122_315 | 15.87 | 37.68 | 3.87 | 56.29 |
| 1122_316 | 12.46 | 40.91 | 15.99 | 79.86 |
| 1122_317 | 19.92 | 51.35 | 75.13 | 91.76 |
| 1122_318 | 19.72 | 55.90 | 84.62 | 96.07 |
| 1122_319 | 14.89 | 40.90 | 30.49 | 84.12 |
| 1122_320 | 14.12 | 38.83 | 35.60 | 80.47 |
| 1122_321 | 16.55 | 47.64 | 39.44 | 85.96 |
| 1122_322 | 19.89 | 46.85 | 51.06 | 83.91 |
| 1122_323 | 16.91 | 39.33 | 31.59 | 85.79 |
| 1122_324 | 13.32 | 34.73 | 23.93 | 76.58 |
| 1122_325 | 13.64 | 36.88 | 34.23 | 82.54 |
| 1122_326 | 17.03 | 47.80 | 65.51 | 93.50 |
| 1122_327 | 13.18 | 34.45 | 0.61 | 41.05 |
| 1122_328 | 28.85 | 51.75 | 33.40 | 73.68 |
| 1122_329 | 18.98 | 45.02 | 9.68 | 55.71 |
| 1122_330 | 26.09 | 52.37 | 29.65 | 77.91 |
| 1122_331 | 19.50 | 48.30 | 9.77 | 63.78 |
| 1122_332 | 17.96 | 54.05 | 7.57 | 72.56 |
| 1122_333 | 18.01 | 45.82 | 5.15 | 54.92 |
| 1122_334 | 16.51 | 45.70 | 5.62 | 58.84 |
| 1122_335 | 15.28 | 35.40 | 5.27 | 59.31 |
| 1122_336 | 18.18 | 45.30 | 24.99 | 75.94 |
| 1122_337 | 27.32 | 61.68 | 43.37 | 85.62 |
| 1122_338 | 22.35 | 54.50 | 54.55 | 91.68 |
| 1122_339 | 22.42 | 50.98 | 58.10 | 91.45 |
| 1122_340 | 25.98 | 55.48 | 52.18 | 86.84 |
| 1122_341 | 40.04 | 67.86 | 66.45 | 85.88 |
| 1122_342 | 33.39 | 65.88 | 81.06 | 97.00 |
| 1122_343 | 23.96 | 57.77 | 66.11 | 92.29 |
| 1122_344 | 19.07 | 50.69 | 51.17 | 87.76 |
| 1122_345 | 22.73 | 44.26 | 43.13 | 68.43 |
| 1122_346 | 28.50 | 52.00 | 39.06 | 76.26 |
| 1122_347 | 25.55 | 51.22 | 43.01 | 74.16 |
| 1122_348 | 31.34 | 57.48 | 78.45 | 88.42 |
| 1122_349 | 27.00 | 49.27 | 70.75 | 88.91 |
| 1122_350 | 27.26 | 49.10 | 71.61 | 83.98 |
| 1122_351 | 29.96 | 53.04 | 67.90 | 84.73 |
| 1122_352 | 47.95 | 67.08 | 76.26 | 94.96 |
| 1122_353 | 23.04 | 45.13 | 38.20 | 81.69 |
| 1122_354 | 19.76 | 54.60 | 20.83 | 84.09 |
| 1122_355 | 28.72 | 64.34 | 44.12 | 83.38 |
| 1122_356 | 23.17 | 54.13 | 35.26 | 84.71 |
| 1122_357 | 36.84 | 57.72 | 87.02 | 89.08 |
| 1122_358 | 31.44 | 55.16 | 70.12 | 98.02 |
| 1122_359 | 23.29 | 42.56 | 75.05 | 86.97 |
| 1122_360 | 46.17 | 76.08 | 83.99 | 97.08 |
| 1122_361 | 45.08 | 79.97 | 59.53 | 89.80 |
| 1122_362 | 20.19 | 52.03 | 67.99 | 91.95 |
| 1122_363 | 20.03 | 51.16 | 61.54 | 92.18 |
| 1122_364 | 18.52 | 49.68 | 67.09 | 90.93 |
| 1122_365 | 27.89 | 63.70 | 84.75 | 96.17 |
| 1122_366 | 26.03 | 58.79 | 72.51 | 94.70 |
| 1122_367 | 26.40 | 57.55 | 74.08 | 90.71 |
| 1122_368 | 22.86 | 56.72 | 76.23 | 94.79 |
| 1122_369 | 25.29 | 55.69 | 84.08 | 96.59 |
| 1122_370 | 22.13 | 53.63 | 79.33 | 102.20 |
| 1122_371 | 20.92 | 49.71 | 82.90 | 102.93 |
| 1122_372 | 78.75 | 89.48 | 90.13 | 86.02 |
| 1122_373 | 21.28 | 37.00 | 29.48 | 65.66 |
| 1122_374 | 21.07 | 39.82 | 38.49 | 65.24 |
| 1122_375 | 27.80 | 45.09 | 50.37 | 98.76 |
| 1122_376 | 41.22 | 73.10 | 74.20 | 89.62 |
| 1122_377 | 33.08 | 70.49 | 55.82 | 86.79 |
| 1122_378 | 39.67 | 76.42 | 61.47 | 101.82 |
| 1122_379 | 33.59 | 55.07 | 60.53 | 94.20 |
| 1122_380 | 35.32 | 56.74 | 61.02 | 91.68 |
| 1122_381 | 23.70 | 36.27 | 41.38 | 76.44 |
| 1122_382 | 44.17 | 72.48 | 102.42 | 107.96 |
| 1122_383 | 26.62 | 48.72 | 59.80 | 80.04 |
| 1122_384 | 20.81 | 36.64 | 68.01 | 81.12 |
| 1122_385 | 23.61 | 42.60 | 73.96 | 82.99 |
| 1122_386 | 28.37 | 47.44 | 86.39 | 91.79 |
| 1122_387 | 23.74 | 47.69 | 77.56 | 93.28 |
| 1122_388 | 24.35 | 47.90 | 92.08 | 97.12 |
| 1122_389 | 34.32 | 57.61 | 94.04 | 99.30 |
| 1122_390 | 34.60 | 56.65 | 91.59 | 90.00 |
| 1122_391 | 31.49 | 54.88 | 87.18 | 93.65 |
| 1122_392 | 25.53 | 49.54 | 89.63 | 87.21 |
| 1122_393 | 32.46 | 55.79 | 87.24 | 90.73 |
| 1122_394 | 29.70 | 54.84 | 91.32 | 91.63 |
| 1122_395 | 24.81 | 48.43 | 84.39 | 85.36 |
| 1122_396 | 21.64 | 48.37 | 88.32 | 106.30 |
| 1122_397 | 27.44 | 52.67 | 46.66 | 85.73 |
| 1122_398 | 27.46 | 48.78 | 58.77 | 84.48 |
| 1122_399 | 33.72 | 53.83 | 77.24 | 96.59 |
| 1122_400 | 34.23 | 70.11 | 74.49 | 91.35 |
| 1122_401 | 40.45 | 65.20 | 74.57 | 92.43 |
| 1122_402 | 44.99 | 66.13 | 68.64 | 94.15 |
| 1122_403 | 41.50 | 62.63 | 74.02 | 88.51 |
| 1122_404 | 49.88 | 69.59 | 81.27 | 104.32 |
| 1122_405 | 26.42 | 46.67 | 64.61 | 85.54 |
| 1122_406 | 22.20 | 43.08 | 64.84 | 93.36 |
| 1816_2 | 60.44 | 75.00 | 72.19 | 101.12 |
| 1816_3 | 32.49 | 64.72 | 81.52 | 99.97 |
| 1816_4 | 20.62 | 53.39 | 86.99 | 94.28 |
| 1816_5 | 28.44 | 63.88 | 87.90 | 101.86 |
| 1816_6 | 22.90 | 52.87 | 82.34 | 95.59 |
| 1816_7 | 80.07 | 88.95 | 93.22 | 101.92 |
| 1816_8 | 43.52 | 67.76 | 96.84 | 104.02 |
| 1816_9 | 21.44 | 54.71 | 92.27 | 103.41 |
| 1816_10 | 17.09 | 49.44 | 76.99 | 95.59 |
| 1816_11 | 21.06 | 53.06 | 78.28 | 98.39 |
| 1816_12 | 20.06 | 55.59 | 84.79 | 102.08 |
| 1816_13 | 17.14 | 48.05 | 93.50 | 100.40 |
| 1816_14 | 19.55 | 59.40 | 90.51 | 105.28 |
| 1816_15 | 22.72 | 59.25 | 101.19 | 106.47 |
| 1816_16 | 24.44 | 62.31 | 96.03 | 102.54 |
| 1816_17 | 22.53 | 55.69 | 91.49 | 101.21 |
| 1816_18 | 21.46 | 53.93 | 85.50 | 99.48 |
| 1816_19 | 21.31 | 54.40 | 87.10 | 95.06 |
| 1816_20 | 23.72 | 53.87 | 92.47 | 105.09 |
| 1816_21 | 19.76 | 50.72 | 89.60 | 105.93 |
| 1816_22 | 95.15 | 104.15 | 102.13 | 103.05 |
| 1816_24 | 91.75 | 95.00 | 98.28 | 102.02 |
| 1816_25 | 56.04 | 88.36 | 86.52 | 109.26 |
| 1816_26 | 102.21 | 101.78 | 105.12 | 108.00 |
| 1816_27 | 24.15 | 67.01 | 92.61 | 99.83 |
| 1816_28 | 21.76 | 57.39 | 101.49 | 98.46 |
| 1816_29 | 30.53 | 72.76 | 99.75 | 98.54 |
| 1816_30 | 24.86 | 57.27 | 74.75 | 84.15 |
| 1816_31 | 41.00 | 72.35 | 106.54 | 101.47 |
| 1816_32 | 21.68 | 53.64 | 83.45 | 100.28 |
| 1816_33 | 36.10 | 74.71 | 78.48 | 109.62 |
| 1816_34 | 43.48 | 68.78 | 90.47 | 99.53 |
| 1816_35 | 78.05 | 89.09 | 93.93 | 96.53 |
| 1816_36 | 81.65 | 87.07 | 91.10 | 97.06 |
| 1816_37 | 62.87 | 82.62 | 96.63 | 102.82 |
| 1816_38 | 34.50 | 62.63 | 88.71 | 98.47 |
| 1816_39 | 17.06 | 43.55 | 68.41 | 91.25 |
| 1816_40 | 22.42 | 59.75 | 58.94 | 93.82 |
| 1816_41 | 24.34 | 60.50 | 78.94 | 94.74 |
| 1816_42 | 17.21 | 51.49 | 88.87 | 106.71 |
| 1816_43 | 15.45 | 48.67 | 93.79 | 96.40 |
| 1816_44 | 27.69 | 62.14 | 89.86 | 98.76 |
| 1816_45 | 28.43 | 62.53 | 93.60 | 104.83 |
| 1816_46 | 38.65 | 95.31 | 99.48 | 95.34 |
| 1816_47 | 39.25 | 73.69 | 85.32 | 99.46 |
| 1816_48 | 72.88 | 95.79 | 95.86 | 105.23 |
| 1816_49 | 42.05 | 72.73 | 95.26 | 95.07 |
| 1816_50 | 24.87 | 61.64 | 93.95 | 95.41 |
| 1816_51 | 24.13 | 58.48 | 94.87 | 86.45 |
| 1816_52 | 19.07 | 46.64 | 61.73 | 103.50 |
| 1816_53 | 24.65 | 59.39 | 95.95 | 103.39 |
| 1816_54 | 18.52 | 50.37 | 75.25 | 100.65 |
| 1816_55 | 21.38 | 55.81 | 80.93 | 97.54 |
| 1816_56 | 23.72 | 74.56 | 81.95 | 94.12 |
| 1816_57 | 31.08 | 63.23 | 97.13 | 97.12 |
| 1816_58 | 26.25 | 60.06 | 82.44 | 91.63 |
| 1816_59 | 38.54 | 74.45 | 96.86 | 99.10 |
| 1816_60 | 21.27 | 53.40 | 102.79 | 95.99 |
| 1816_61 | 22.84 | 55.21 | 84.32 | 108.50 |
| 1816_62 | 28.18 | 66.34 | 89.02 | 100.92 |
| 1816_63 | 22.52 | 58.32 | 99.09 | 104.39 |
| 1816_64 | 17.21 | 48.69 | 101.88 | 109.05 |
| 1816_65 | 18.02 | 48.71 | 97.59 | 108.12 |
| 1816_66 | 24.48 | 59.70 | 98.74 | 91.48 |
| 1816_67 | 25.08 | 60.20 | 102.17 | 102.41 |
| 1816_68 | 18.20 | 52.03 | 93.53 | 107.27 |
| 1816_69 | 28.58 | 64.76 | 100.03 | 95.56 |
| 1816_70 | 32.32 | 65.70 | 93.94 | 104.28 |
| 1816_71 | 47.83 | 78.25 | 89.25 | 109.07 |
| 1816_72 | 35.33 | 62.27 | 91.64 | 107.72 |
| 1816_73 | 20.55 | 98.77 | 85.68 | 103.65 |
| 1816_74 | 26.71 | 60.10 | 87.66 | 99.83 |
| 1816_75 | 31.75 | 70.98 | 92.29 | 103.96 |
| 1816_76 | 30.37 | 70.69 | 90.86 | 92.75 |
| 1816_77 | 46.64 | 80.44 | 96.29 | 96.64 |
| 1816_78 | 66.00 | 85.83 | 105.70 | 99.60 |
| 1816_79 | 48.67 | 81.73 | 106.97 | 104.42 |
| 1816_80 | 44.30 | 78.70 | 103.70 | 96.43 |
| 1816_81 | 35.02 | 71.62 | 106.18 | 92.41 |
| 1816_82 | 35.59 | 74.21 | 101.32 | 95.75 |
| 1816_83 | 31.00 | 68.54 | 101.18 | 108.75 |
| 1816_84 | 36.03 | 64.72 | 106.82 | 105.76 |
| 1816_85 | 33.15 | 61.56 | 88.45 | 90.53 |
| 1816_86 | 56.37 | 79.42 | 90.69 | 82.37 |
| 1816_87 | 78.23 | 89.04 | 100.79 | 100.34 |
| 1816_88 | 59.21 | 78.21 | 98.16 | 100.09 |
| 1816_89 | 48.25 | 69.64 | 108.37 | 103.72 |
| 1816_90 | 45.69 | 67.16 | 98.04 | 103.46 |
| 1816_91 | 42.96 | 60.75 | 102.38 | 96.43 |
| 1816_92 | 25.54 | 49.02 | 99.38 | 98.21 |

### Example 15: In Vitro Toxicity Evaluation—Caspase Assays

### Materials and Methods:

[0514] Based on the results in Table 12, the 79 compounds most potent in targeting ATXN3 with the least effect on KCNB2 were selected for toxicity evaluation in two caspase activation assays (see Dieckmann et al., Molecular Therapy: Nucleic Acids Vol. 10 Mar. 2018, pp 45 54); respectively conducted in HepG2 cells (“HEPG2”) and 3T3 cells (“3T”).

### Results.

[0515] The results are shown in Table 13. Using the same scoring criteria as in Example 7, the vast majority of the compounds were found safe in the toxicity assessment. In the “HEPG2” assay, compound 1816_52 had a score of 0.5, compounds 1816_0 and 1816_40 a score of 1, and compound 1816_39 a score of 3. In the “3T3” assay, the compounds with a score of 0.5 were: 18161_11, 1816_74, and 1816_30; the compounds with a score of 1 were: 1816_54 and 1816_10; the compound with a score of two was: 1816_51; and the compounds with a score of three were: 1816_40 and 1816_39,

TABLE 13

| | HepG2 | 3T3 | EC50 | EC50 | EC50 ratio |
|---|---|---|---|---|---|
| | Assay | Assay | ATXN3 | KCNB2 | (KCNB2/ |
| CMPIDNO | score | score | (nM) | (nM) | ATXN3) |
| 1122_33 | 0 | 0 | 103.7 | 2330 | 22.5 |
| 1122_67 | 0 | 0 | 71.09 | 155.40 | 2.20 |
| 1122_91 | 0 | 0 | 87.73 | 673.50 | 7.68 |
| 1122_107 | 0 | 0 | 89.93 | 789.00 | 8.77 |
| 1122_125 | 0 | 0 | 81.85 | 98.95 | 1.2 |
| 1122_144 | 0 | 0 | 103.10 | 515.60 | 5.00 |
| 1122_146 | 0 | 0 | 93.11 | 490.10 | 5.26 |
| 1122_149 | 0 | 0 | 62.77 | 766.80 | 12.22 |
| 1122_150 | 0 | 0 | 89.36 | 808.50 | 9.05 |
| 1122_151 | 0 | 0 | 75.71 | 654.80 | 8.65 |
| 1122_152 | 0 | 0 | 66.09 | 662.20 | 10.02 |
| 1122_153 | 0 | 0 | 84.38 | 1208.00 | 14.32 |
| 1122_154 | 0 | 0 | 64.22 | 820.00 | 12.77 |
| 1122_155 | 0 | 0 | 75.16 | 1303.00 | 17.34 |
| 1122_156 | 0 | 0 | 55.26 | 736.10 | 13.32 |
| 1122_157 | 0 | 0 | 71.27 | 1658.00 | 23.26 |
| 1122_158 | 0 | 0 | 53.18 | 1217.00 | 22.88 |
| 1122_159 | 0 | 0 | 92.93 | 1472.00 | 15.84 |
| 1122_160 | 0 | 0 | 57.47 | 791.50 | 13.77 |
| 1122_163 | 0 | 0 | 98.81 | 564.40 | 5.71 |
| 1122_167 | 0 | 0 | 87.59 | 763.60 | 8.72 |
| 1122_172 | 0 | 0 | 67.13 | 465.70 | 6.94 |
| 1122_175 | 0 | 0 | 127.90 | 1277.00 | 9.98 |
| 1122_218 | 0 | 0 | 87.76 | 311.80 | 3.55 |
| 1122_294 | 0 | 0 | 93.12 | 2338.00 | 25.11 |
| 1122_296 | 0 | 0 | 114.80 | 8032.00 | 69.97 |
| 1122_302 | 0 | 0 | 104.10 | 682.80 | 6.56 |
| 1122_313 | 0 | 0 | 90.50 | 418.70 | 4.63 |
| 1122_319 | 0 | 0 | 70.04 | 408.20 | 5.83 |
| 1122_320 | 0 | 0 | 87.66 | 364.50 | 4.16 |
| 1122_323 | 0 | 0 | 99.59 | 720.60 | 7.24 |
| 1122_325 | 0 | 0 | 90.83 | 585.40 | 6.45 |
| 1122_359 | 0 | 0 | 108.80 | 1365.00 | 12.55 |
| 1122_373 | 0 | 0 | 80.50 | 176.20 | 2.19 |
| 1122_374 | 0 | 0 | 111.70 | 274.20 | 2.45 |
| 1122_375 | 0 | 0 | 173.00 | 364.20 | 2.11 |
| 1122_381 | 0 | 0 | 83.62 | 277.80 | 3.32 |
| 1122_384 | 0 | 0 | 117.70 | 856.90 | 7.28 |
| 1122_385 | 0 | 0 | 112.10 | 1754.00 | 15.65 |
| 1122_406 | 0 | 0 | 142.70 | 647.00 | 4.53 |
| 1816_4 | 0 | 0 | 200.90 | 248307.00 | 1235.97 |
| 1816_6 | 0 | 0 | 261.00 | 26826.00 | 102.78 |
| 1816_9 | 0 | 0 | 224.00 | 3280.00 | 14.64 |
| 1816_10 | 0 | 1 | — | — | — |
| 1816_11 | 0 | 0.5 | — | — | — |
| 1816_12 | 0 | 0 | 110 | 27238 | 247.6 |
| 1816_13 | 0 | 0 | 129.30 | 36344.00 | 281.08 |
| 1816_14 | 0 | 0 | 181.10 | 2262.00 | 12.49 |
| 1816_15 | 0 | 0 | 159.80 | 18449.00 | 115.45 |
| 1816_17 | 0 | 0 | 208.90 | 33758.00 | 161.60 |
| 1816_18 | 0 | 0 | 138.40 | 322538.00 | 2330.48 |
| 1816_19 | 0 | 0 | 180.40 | 107214.00 | 594.31 |
| 1816_20 | 0 | 0 | 299.50 | 279468.00 | 933.12 |
| 1816_21 | 0 | 0 | 203.00 | 16057.00 | 79.10 |
| 1816_28 | 0 | 0 | 141.10 | 10000.00 | 70.87 |
| 1816_30 | 1 | 0.5 | — | — | — |
| 1816_32 | 0 | 0 | 170.80 | 13406.00 | 78.49 |
| 1816_39 | 3 | 3 | — | — | — |
| 1816_40 | 1 | 3 | — | — | — |
| 1816_41 | 0 | 0 | 154.50 | 12106.00 | 78.36 |
| 1816_42 | 0 | 0 | 134.60 | 63672.00 | 473.05 |
| 1816_43 | 0 | 0 | 89.79 | 569489.00 | 6342.45 |
| 1816_51 | 0 | 0 | 239.70 | 9150.00 | 38.17 |
| 1816_52 | 0.5 | 2 | — | — | — |
| 1816_53 | 0 | 0 | 392.80 | 35864.00 | 91.30 |
| 1816_54 | 0 | 1 | — | — | — |
| 1816_55 | 0 | 0 | 209.00 | 7219.00 | 34.54 |
| 1816_58 | 0 | 0 | 259.00 | 23941.00 | 92.44 |
| 1816_60 | 0 | 0 | 167.10 | 67695.00 | 405.12 |
| 1816_61 | 0 | 0 | 165.20 | 22618.00 | 136.91 |
| 1816_63 | 0 | 0 | 263.00 | 19355.00 | 73.59 |
| 1816_64 | 0 | 0 | 127.00 | 5929.00 | 46.69 |
| 1816_65 | 0 | 0 | 99.75 | 36592.00 | 366.84 |
| 1816_66 | 0 | 0 | 351.30 | 3822.00 | 10.88 |
| 1816_67 | 0 | 0 | — | — | — |
| 1816_68 | 0 | 0 | 177.80 | 112276.00 | 631.47 |
| 1816_74 | 0 | 0.5 | — | — | — |
| 1816_91 | 0 | 0 | — | — | — |
| 1816_92 | 0 | 0 | 175.20 | 1472.00 | 8.40 |

### Example 16: Determination of EC 50 Values for ATXN3 and KCNB2 in iCell® Glutaneurons

### Materials and Methods:

[0516] 69 compounds were assessed in an EC50 determination in iCell Glutaneurons including compound 1122_67 and 1122_33. The experimental setup was the same as described in Example 14, except that the following compound concentrations were used (nM): 31.6, 10; 3.2; 0.32; 0.1; 0.03; 0.01 (8-step half-log).

### Results:

[0517] The resulting EC50 values for ATXN3 and KCNB2 as well as the resulting ratio between the EC50 values (KCNB2/ATXN3) are shown in Table 13. From the data. generated, it was observed that the compounds showed an increased ratio between the determined EC50 values for KCNB2 and ATXN3 as compared to compound 1122_67. The potency of the compounds on ATXN3 knockdown was relatively maintained for most compounds while it was decreased (higher EC50 value) for all compounds when focusing on the potency on KCNB2 knockdown.

[0518] Based on the data in Table 12 (double point determination) and Table 13 (caspase in vitro toxicity; EC50 for ATXN3 knock down and the ratio between KCNB2 and ATXN3 EC50 values), 27 compounds (shown in Table 14 and in FIG. 12) were selected based on their safety (caspase scores above 0 were discontinued), high potency and efficacy in ATXN3 inhibition, selectivity (i.e., high ratio between KCNB2/ATXN3 EC50 values) as well as their chemical diversity.

[0519] The base sequence, sugar sequence and backbone sequence features of the selected compounds are shown in Table 14, using the HELM-dictionary shown below (see Example 13 for more detailed HELM annotations).

| Base sequence | Sugar sequence | Backbone sequence |
|---|---|---|
| A: (A) | D: [dR] | M: [MOPS] |
| C: (C) | F: [fR] | S: [ssP] |
| E: (5meC) | L: [LR] | X: [sP] |
| G: (G) | M: [MOE] | |
| T: (T) | O: [mR] | |
| U: (U) | | |

TABLE 14
Selected compounds

| CMPIDNO | Base sequence | Sugar sequence | Backbone sequence | FIG. |
|---|---|---|---|---|
| 1122_91 | AATETTATTUACATCTTEE | LDDLDLDDDODDDDDDLLL | XXXXXXXXXXXXXXXXXX | 12A |
| 1122_107 | AAUETTATTTACATCTTEE | LLOLDDDDDDDDDDDLDLL | XXXXXXXXXXXXXXXXXX | 12B |
| 1122_154 | AATETTATTTACATCTTEE | LDDLDLDDDDDDDDDDLLL | XXXXXXXXXXSXXXXXXX | 12C |
| 1122_155 | AATETTATTTACATCTTEE | LDDLDLDDDDDDDDDDLLL | XXXXXXXXXXXSXXXXXX | 12D |
| 1122_156 | AATETTATTTACATCTTEE | LDDLDLDDDDDDDDDDLLL | XXXXXXXXXXXXSXXXXX | 12E |
| 1122_157 | AATETTATTTACATCTTEE | LDDLDLDDDDDDDDDDLLL | XXXXXXXXXXXXXSXXXX | 12F |
| 1122_158 | AATETTATTTACATCTTEE | LDDLDLDDDDDDDDDDLLL | XXXXXXXXXXXXXXSXXX | 12G |
| 1122_167 | AATETTATTTACATCTTEE | LDDLDLMDDDDDDDDDLLL | XXXXXXXXXXXXXXXXXX | 12H |
| 1122_172 | AATETTATTTACATCTTEE | LDDLDLDDDDDDDDODLLL | XXXXXXXXXXXXXXXXXX | 12I |
| 1122_175 | AATETTATTTACATCTTEE | LDDLDLDDDDODDDDDLLL | XXXXXXXXXXXXXXXXXX | 12J |
| 1122_294 | AATETTATTTACATCTTCE | LDDLDLDDDDDDDDDDLFL | XXXXXXXXXXXXXXXXXX | 12K |
| 1122_296 | AATCTTATTTACATCTTEE | LDDODLDDDDDDDDDDLLL | XXXXXXXXXXXXXXXXXX | 12L |
| 1122_359 | AATETTATTTACATCTTEE | LLLLDDDDDDDDDDDLDLL | XXXXXXXXXXXXXXMXXX | 12M |
| 1122_384 | AATETTATTTACATCTTEE | LLLLDDDDDDDDDDDLDLL | XXXXXXXXXXXXXXXMXX | 12N |
| 1122_385 | AATETTATTTACATCTTEE | LDDLDLDDDDDDDDDDLLL | XXXXXMXXXXXXXXXXXX | 12O |
| 1816_13 | GAATETTATTTACATETT | LLDDLDLLDDDDDDDLLL | XXXXXXXXXXXSXXXXX | 12P |
| 1816_15 | GAATETTATTTACATETT | LLDDLDLLDDDDDDDLLL | XXXXXXXXXXXXXSXXX | 12Q |
| 1816_28 | GAATETTATTTACATETT | LLDDLDLFDDDDDDDLLL | XXXXXXXXXXXXXXXXX | 12R |
| 1816_41 | GAATETTATTTACATETT | LLLDLDLLDDDDDDDLLL | XXXXXXXXXXXXXXXXX | 12S |
| 1816_42 | GAATETTATTTACATETT | LLDDLDLLDDDDDDDLML | XXXXXXXXXXXXXXXXX | 12T |
| 1816_43 | GAATETTATTTACATETT | LLDDLDLLDDDDDDDMLL | XXXXXXXXXXXXXXXXX | 12U |
| 1816_60 | GAATETTATTTACATETT | LLDDLDLODDDDDDDLLL | XXXXXXXXXXXXXXXXX | 12V |
| 1816_61 | GAATETTATTTACATETT | LLODLDLLDDDDDDDLLL | XXXXXXXXXXXXXXXXX | 12W |
| 1816_64 | GAATETTATTTACATCTT | LLDDLDLLDDDDDDDFLL | XXXXXXXXXXXXXXXXX | 12X |
| 1816_65 | GAATETTATTTACATCTT | LLDDLDLLDDDDDDDOLL | XXXXXXXXXXXXXXXXX | 12Y |
| 1816_68 | GAATETTATTTACATEUT | LLDDLDLLDDDDDDDLFL | XXXXXXXXXXXXXXXXX | 12Z |
| 1816_92 | GAATETTATTTACATETT | LLDDLDLLDDDDDDDLLL | XXXXXXXXXXXXXXXMX | 12AA |

TABLE 8B

| | Cortex | | Midbrain | | Cerebellum | | Hippocampus | | Pons/medulla | | Striatum | |
|---|---|---|---|---|---|---|---|---|---|---|---|---|
| | | Max | | Max | | Max | | Max | | Max | | Max |
| | EC50 | efficacy (% | EC50 | efficacy (% | EC50 | efficacy (% | EC50 | efficacy (% | EC50 | efficacy (% | EC50 | efficacy (% |
| Compounds | (nM) | remaining) | (nM) | remaining) | (nM) | remaining) | (nM) | remaining) | (nM) | remaining) | (nM) | remaining) |
| 1856_1 | 251 | 33 | 77 | 20 | 434 | 49 | 202 | 41 | — | 24 | 103 | 27 |
| 1813_1 | 260 | 22 | 93 | 20 | 347 | 47 | 279 | 30 | — | 22 | 89 | 18 |
| 1812_1 | 307 | 52 | 156 | 28 | 603 | 50 | 233 | 35 | — | 26 | 184 | 32 |
| 1809_2 | 134 | 57 | 153 | 34 | 511 | 50 | 111 | 46 | — | 21 | 93 | 29 |
| 1607_1 | 193 | 40 | 89 | 17 | 120 | 42 | 81 | 21 | — | 15 | 63 | 26 |
| 1122_62 | 125 | 56 | 74 | 26 | 226 | 16 | 86 | 46 | — | 19 | 54 | 36 |
| 1122_67 | 125 | 23 | 79 | 14 | 261 | 27 | 146 | 22 | — | 13 | 88 | 19 |
| 1122_33 | 102 | 47 | 38 | 16 | 166 | 35 | 79 | 24 | — | 17 | 63 | 29 |

TABLE 10

| | | Cortex (A1) | | Cerebellum | | Brainstem | | Midbrain | | Striatum | |
|---|---|---|---|---|---|---|---|---|---|---|---|
| | | EC50 | Max KD | EC50 | Max KD | EC50 | Max KD | EC50 | Max KD | EC50 | Max KD |
| Tissue | | (nM) | observed | (nM) | observed | (nM) | observed | (nM) | observed | (nM) | observed |
| 1 week of | 1122_67 | 242 | 88% | 833 | 74% | 196 | 87% | 165 | 89% | 148 | 77% |
| treatment | 1813_1 | 278 | 61% | 966 | 57% | 377 | 85% | 183 | 90% | 118 | 51% |
| | 1100673 | 391 | 67% | 2012 | 48% | 769 | 79% | 279 | 81% | 331 | 69% |
| 4 week of | 1122_67 | 100 | 92% | 365 | 81% | 81 | 93% | 94 | 95% | 46 | 89% |
| treatment | 1813_1 | ND | ND | ND | ND | ND | ND | ND | ND | ND | ND |
| | 1100673 | 199 | 49% | 1229 | 33% | 419 | 72% | 129 | 74% | 130 | 35% |

| | | | | Spinal cord, | | Spinal cord, | | Spinal cord, | |
|---|---|---|---|---|---|---|---|---|---|
| | | Hippocampus | | cervical | | thoracic | | lumbar | |
| | | EC50 | Max KD | EC50 | Max KD | EC50 | Max KD | EC50 | Max KD |
| Tissue | | (nM) | observed | (nM) | observed | (nM) | observed | (nM) | observed |
| 1 week of | 1122_67 | 243 | 75% | 41 | 89% | 39 | 90% | 54 | 89% |
| treatment | 1813_1 | 341 | 63% | 45 | 90% | 36 | 92% | 48 | 91% |
| | 1100673 | 516 | 66% | 83 | 83% | 51 | 83% | 68 | 82% |
| 4 week of | 1122_67 | 89 | 92% | 16 | 93% | Imprecise | 93% | 18 | 93% |
| treatment | 1813_1 | ND | ND | ND | ND | ND | ND | ND | ND |
| | 1100673 | 329 | 52% | 48 | 83% | Imprecise | 84% | 56 | 84% |

TABLE 15
Particular antisense oligonucleotide variants of SEQ ID NO: 1122
Options for nucleobases, sugar modifications and internucleoside linkages for particular
antisense oligonucleotides according to the invention. The options from which the nucleoside
at each specific residue # in SEQ ID NO: 1122 can be chosen is shown in each line indicated by
that residue #, starting from the 5′-end. The selection of a specific nucleobase (“Nucleobase
options for residue #”) and a sugar modification (“Sugar modification options for residue #”)
defines the nucleoside at that residue #. The options for the internucleoside linkage between
the nucleoside at a specific residue # and the next residue,starting from the 5′-end, is
shown in the column entitled “Backbone modification options for internucleoside linkage #”.

| Residue # | Nucleobase options | | Backbone modification |
|---|---|---|---|
| in SEQ ID | for residue # | Sugar modification options | options for |
| NO: 1122 | A: (A); C: (C); | for residue # | internucleoside linkage |
| (from 5′- | E: (5meC); G: (G); | D: F: [fR]; L: [LR]; | # (from 5′-end) |
| end) | T: (T); U: (U) | M: [MOE]; O: [mR] | M: [MOPS]; S: [ssP]; X: [sP] |
| 1 | AAAAAAAAAAAAAAA | LLLLLLLLLLLLLLL | XXXXXXXXXXXXXXX |
| 2 | AAAAAAAAAAAAAAA | DLDDDDDDDDDDLLD | XXXXXXXXXXXXXXX |
| 3 | TUTTTTTTTTTTTTT | DODDDDDDDDDDLLD | XXXXXXXXXXXXXXX |
| 4 | EEEEEEEEEEECEEE | LLLLLLLLLLLOLLL | XXXXXXXXXXXXXXX |
| 5 | TTTTTTTTTTTTTTT | DDDDDDDDDDDDDDD | XXXXXXXXXXXXXXX |
| 6 | TTTTTTTTTTTTTTT | LDLLLLLLLLLLDDL | XXXXXXXXXXXXXXM |
| 7 | AAAAAAAAAAAAAAA | DDDDDDDMDDDDDDD | XXXXXXXXXXXXXXX |
| 8 | TTTTTTTTTTTTTTT | DDDDDDDDDDDDDDD | XXXXXXXXXXXXXXX |
| 9 | TTTTTTTTTTTTTTT | DDDDDDDDDDDDDDD | XXXXXXXXXXXXXXX |
| 10 | UTTTTTTTTTTTTTT | ODDDDDDDDDDDDDD | XXXXXXXXXXXXXXX |
| 11 | AAAAAAAAAAAAAAA | DDDDDDDDDODDDDD | XXSXXXXXXXXXXXX |
| 12 | CCCCCCCCCCCCCCC | DDDDDDDDDDDDDDD | XXXSXXXXXXXXXXX |
| 13 | AAAAAAAAAAAAAAA | DDDDDDDDDDDDDDD | XXXXSXXXXXXXXXX |
| 14 | TTTTTTTTTTTTTTT | DDDDDDDDDDDDDDD | XXXXXSXXXXXXXXX |
| 15 | CCCCCCCCCCCCCCC | DDDDDDDDODDDDDD | XXXXXXSXXXXXMXX |
| 16 | TTTTTTTTTTTTTTT | DLDDDDDDDDDDLLD | XXXXXXXXXXXXXMX |
| 17 | TTTTTTTTTTTTTTT | LDLLLLLLLLLLDDL | XXXXXXXXXXXXXXX |
| 18 | EEEEEEEEEECEEEE | LLLLLLLLLLFLLLL | XXXXXXXXXXXXXXX |
| 19 | EEEEEEEEEEEEEEE | LLLLLLLLLLLLLLL | |

TABLE 16
Particular antisense oligonucleotide variants of SEQ ID NO: 1816
Options for nucleobases, sugar modifications and internucleoside linkages for particular
antisense oligonucleotides according to the invention. The options from which the nucleoside at
each specific residue # in SEQ ID NO: 1122 can be chosen is shown in each line indicated by that
residue #, starting from the 5′-end. The selection of a specific nucleobase (“Nucleobase options
for residue #”) and a sugar modification (“Sugar modification options for residue #”) defines
the nucleoside at that residue #. The options for the internucleoside linkage between the
nucleoside at a specific residue # and the next residue, starting from the 5′-end, is shown in
the column entitled “Backbone modification options for internucleoside linkage #”.

| Residue # | | | Backbone modification |
|---|---|---|---|
| in SEQ | Nucleobase options | Sugar modification | options for residue # |
| ID NO: 1816 | for residue # | options for residue # | (from 5′-end) |
| (from | A: (A); C: (C); E: (5meC); | D: F: [fR]; L: [LR]; | M: [MOPS]; S: [ssP]; |
| 5′-end) | G: (G); T: (T); U: (U) | M: [MOE]; O: [mR] | X: [sP] |
| 1 | GGGGGGGGGGGG | LLLLLLLLLLLL | XXXXXXXXXXXX |
| 2 | AAAAAAAAAAAA | LLLLLLLLLLLL | XXXXXXXXXXXX |
| 3 | AAAAAAAAAAAA | DDDLDDDODDDD | XXXXXXXXXXXX |
| 4 | TTTTTTTTTTTT | DDDDDDDDDDDD | XXXXXXXXXXXX |
| 5 | EEEEEEEEEEEE | LLLLLLLLLLLL | XXXXXXXXXXXX |
| 6 | TTTTTTTTTTTT | DDDDDDDDDDDD | XXXXXXXXXXXX |
| 7 | TTTTTTTTTTTT | LLLLLLLLLLLL | XXXXXXXXXXXX |
| 8 | AAAAAAAAAAAA | LLFLLLOLLLLL | XXXXXXXXXXXX |
| 9 | TTTTTTTTTTTT | DDDDDDDDDDDD | XXXXXXXXXXXX |
| 10 | TTTTTTTTTTTT | DDDDDDDDDDDD | XXXXXXXXXXXX |
| 11 | TTTTTTTTTTTT | DDDDDDDDDDDD | XXXXXXXXXXXX |
| 12 | AAAAAAAAAAAA | DDDDDDDDDDDD | SXXXXXXXXXXX |
| 13 | CCCCCCCCCCCC | DDDDDDDDDDDD | XXXXXXXXXXXX |
| 14 | AAAAAAAAAAAA | DDDDDDDDDDDD | XSXXXXXXXXXX |
| 15 | TTTTTTTTTTTT | DDDDDDDDDDDD | XXXXXXXXXXXX |
| 16 | EEEEEEEECCEE | LLLLLMLLFOLL | XXXXXXXXXXXM |
| 17 | TTTTTTTTTTUT | LLLLMLLLLLFL | XXXXXXXXXXXX |
| 18 | TTTTTTTTTTTT | LLLLLLLLLLLL | |

The application's sequence listing, which the Patent Office published only in electronic form, follows.

SEQUENCE LISTING (1992 sequences)

SEQ ID NO: 1 - DNA, 62130 bp, hsapiens
ggaggagaggggcagggggcggagctggagggggtggttcggcgtgggggccgttggctccagacaaataaacatggagtccatcttccacgagaaagtgagtgtccgcgttcggtggggagctgtctgccgcgcggtggcgggcgtggagcgcggcatcaccgcctctcggagggctgggtggggcccgagtcgcccccatgccgatctcgcccggcgaggggcgacgccgcagcctcccgcctcctcggctcgaggaggggagcatcacctacgcccctacttcccccgcggcccccgccctgggagccgggagggagtatgggcggggccgggggcgtctcgggacacgggagtggggtggcgcccagtgggtttgcttctgcctttctccgtcactttccatcgcttttcggaggattccttcacccctccccaatccttccctctccctagggtctagctagagtcatctctgggacacctccctcaacccctcctaccctaatcctggcagaattaacttttcctcctccggactgctcaattctatattggagtcttccctacacgtagatctttggggtcttgttcgtgtctttcccctgcactaggtccgcgagcctcccgagggaggagaccttggctcgcccactgtagggcctgacatttaggaagtgaagtaggaaacccggcgtgcccctaaacagggaagtcgtcacaagagtttttattacgggatgtttgggtttggtttcttttggtactcccatctttccggagcaggcggccagctttgtttttaggtattaggagtggactgggatgattttgttgtagtctgcctagcctgctgtccctttaactcttccgtgaccatgcacttgaagatactgtttgtgatatgtaaagaaactcctcgtttctctcatactattatccagccatttgtgtgtgagtgaagccttccccaggacagctttggcacatggtatcatgtttcataatagtttcgtgtttggaaagagttgctggtaaggctgttatttaataggaggagcaaagggtttttgttttattaaatacttataaatgatcatttatcccagacatttaaaattcacacacacacaacaaataaagcaaagacaaaagaatacatttaccaaatgtaaatctgtagcataaattttttttaatttttattttaaagatggggtctcattctgtcacccaggcaggtgtgcaatggagagatcatggctcactgcagccttgatctcctaggcacaagcgatcctcccgcctctgcctccagagtagctgggactacaggtgcatatcgccagggccaggtaatgtttttgggagagacggggtctcgctgtgttgcccaggctggtctcgaactcctggactcaggtgattctcccacctcggcctctcgaagtgctgtgattacaggcgtgagccactgtgcctggaacaaattgttaagtacaatgcttttcattgtagaaaacatctcggaaacttttgaaataggctgatgttcagtgggggaggaaggactcagtcgtatagttgtcactaattttttgacttgattgacatgactcgtaaatcatagacaatagagatttggttgcttggctgagtagagtgcgtgaaaaatacacacgtacttttttttttttttttttgagatggagtttggctcttgtcacccaggctggagtgcaatggcgccatcatggctcactgcaacctccgcctccccgttcaagcgattctcctgcctcagtctccccagtagctgagattacaggcgcccgccaccacgcccagctaatttttgtatttttagtagagacagggtttcaccatgttggccaggctggtctccaactcctgacaggtggtccgcccgcctcggcctcccaaagtgctgggattacaggcgtgagccaccgcacccggccatatttttgttattaattttcaaaggctttggtgtgggaccacatttcaacatggaaggccttaaacatgttccacactacttcctgagaattagacaagatttttaacaatattgttacctagttgggacacatttgtactgacccatgggatgaaaaaaagctgagtgctagcctagtgaaaatctacttacccgaaagaaatccctcttagtctgggtgcagtggctcacaccagtgctttgggaggcccagacgggcggatcatgaggtcagtagtttgagaccagcctggccaacatggtgaaaccccgtctctactaaaaatacaaaaaattagccaggtgtggtggcaggcgcctgtaatcccaggtactctggaggctgaggcaggagaattgcttgaacccgagaggcagaggttgcagtgagccgagaccgtgccactgcacttcagcctgggcaacagagcgagactccgtctcaaaaaaaagaaaaggaaaaaagagtccctcttaattatcagcatgtgtataggcctacagatacttcaggaatacctttaccattatcatcaacttgtatctacatagcatgtgaagattcaacaatttagttttttgggcgtcctcaagagtacgcacctataaccatatggcccaattgttaatctcctatacagtccattctgggaatgtttgggcttactgtgccatttttccgttcactgccttcccctctgcaatatacctttaacccttgctaggtcctgggtttggagagccagagaaccaactttggccctaaagaagctgtgtaggtagcaatatctgcctacgaagggccttgcaaccatttcctcttggaaccttggtttcctctttctgagtagtcactttgagtaccctttattaagttagaatgtaaaaacagtttctcactgatatatctgcagtgcctgagagagggcctggcacagagtaagtactcaataaatatttgaatggggccgggcgtggtgagacctgtctctacaagaatgaacaaaattagctgggcgtgttagcacatgcctgtagacttgggaggctgaggtgggaggattgcatgagtctgggaggtcgaggctgtagtgagccatgatcgcaccactgcactccagcctaggggacagagcaagatcctgtctcaaaagaaaaaaatgtatatatttgaatggataaagagatggctttgagtttctgagatatatatggtgctgtttatctaaagtaaacaagttttctgtaaatattttaaggctttgcaggccagctgtagtctctgtcacacattcttatttgtgcatgtttttcccaaccatgtaaaaatgtaaagtgcattcttagctactggggcaggttgaatttggcccatgggctagagtttgccaacccctaacttaaacctttgtactaactttatgaccactactggatttttgttgttgtttgttttagttctggtgcctgctttgtttttttttttttttttaatcctcttgctgatgtttcttggtgcagttactgtgccatttgtattggtgcttttaatgtaatgcaaactggtaataatatctaaacttgctggggttgtacataaaattattgaaaagattgaaaagatgctgagcattgactctgtggcattcattatgcccttttgtgattgctggattttagccatctttaggacatttgagctttaggagaagccaaattctgtataaatgacttgaagtgctaatagcacaggttttgaaacctctgcctgggtttgagtctcagctctgccttttactacctgtgtgatcctgagcaagttacttagtatccctgtcctctagtttcctcctctgtagtgtggggataataacatagacataacctgagagttagagtgtagagaaggctccctggcagatagtgctgtagaagtactggccattgccattactcaggtgcttgtgtttgctgaacctcatagtaagggctcggagagcactaagaggaggtgagaaatgctgctagattgacagcttgtccccagatagcccattcccgagagcaccttaggtttatacctgatttgtgttgtagttagtagtgtctctggtaatttgaactagtttcaggttggtcttgaaaacctggggaggttgggggtaaatgatttggtagcagttctcttttgtgattttatacattatctttgtagaactgcagtttgctaattctctgagcccaacacaatgaagtctgggcctaaaatcatagaatttcttttatttttttttttgtttttaatttatttattccctccctccctcctttcttcctttcttccttttctttctttctttccttccttccttccttctttcttttctttctttcttttctttctttggagtctcactctgtcaccaggctggagtgcagtggcacgaactttcttcagagtctcactttgtcaccaggctggagtgcagtggcgcgaactcagctcactgcaacctccgtctcctgagttcaagagattctcctgcctcagcctcccgagtagctgggactataggcatgtgccaccatgcccagctaattttcttatttttagtagagacgaggtttcaccatgttggccaggatggtcttgatctcttgacctcgtgatccacctgcctcagcctcccaaagtgcggggattacaggcgtgagctaccacgcccagcctattttttattttttgaggcagagtctcactctgtcacccaggctggagtgcagtggtgcaatctcagctcactgcaacctccgcctcctgggttcaggtgattctcctgccttagcctcctgagcacctgggactacaggcgcctgccaccacacctggctaattcttatatttttagtagaggcggggtttcaccatgttggccaggctggtctcgaactcctgatctcaagtgatcaacctgccttggcctcccaaagtgctggaattacagccatgagccaccatgcccagccaaatcatgagatttcaataccgctgaactttgattatggcaaagtgaacttctgctttgattaaagcttgatgagagaggtggctggggatagtttgagataagggcaaggcaggaaaatgcataatcttacgtgggctcattgtcattgtacaattcttttggtccatgtggaatttgatccgtcctatgacttaagttatgtttatttttgtttttatttttatttattttgtgtctttttgagagacatgatgttgctctgtcacctgggccagaatacagtggcacaatcttagctccgtgtagccttgaactcctgggctcaagtgatcctcccacctcagcccctcaaacagttgagattatagtatgaaccactgtgcctagccttaagtgatttttaaatttgtactgaacagtttgtcctttccttccattaaatcatattagaagtacagaacttgatatttcctgtagcaatacagtttttctttgatgaagtttgatttcaagtacttatttttcataatttaaagctattttttatagagagaattttaatcaaatatttggatgtcactattgctatatatggtattaagtatggtgaccatagtttgtaaactccaaactgacagcaagacaggaaatttgtgttagcaaaggcttttttcttactgtttgaattttttaaaaattagatacaatacagagaggagcacacaaatcattaagagtacagctcagcgaattttcacacagtgaacatgtgtaaacagcaagtaacaaaagatttacctgcatcctataacctcccattattcccttttctaggtactgtctctccactgcattcccaccaaatataaccactatgctgaattctgacatcataaatgagttttgcctgattttgagcttttgtgactggaagtgtacagtgtatataccctttcgattctgtcctctttagtttaccattgtttgagaaatttatccatactgttccagaattaactactgttaattattgttaattaactactgttgtagttaattcatcctcattgttatctagtattcttttgtgagtaaacacaatttccattctactgtgatcccagctatccatttgggtcgtttccagtttggggtccattacaaatagtaatgctatctgtaatgctattttgtattactacaaatagtaatgctatttgtggcacaaaaatactgcttttgtgaacattcttatacatgtcttttgatgaatgtatgtttgcattgctgttgtttacattatgtacctagtaatggaattgctagatcataggagatgtatatattaagctttagtggatgcattacataattattagttattattggttataccaatttatcctctcatcagtagtatacaacagtttctgtatctctaatctccaacattttagccattttagagtttgtgtactaacacattgtggttttaatttacatttccctgatgactaataaagttgagtacctcttttgtgttctttatagccatttgactgtcttgtgaagtgcttgtttgtcttgcctatttttcttttctttctttctttttcttccttccttcctttctttctttcttctttctttccttccttcttttctttctttctgtctttctttcttgtctttcttgtctttctgtctttcttggtcttgccctgtcacccatgctggagtgcagtggtgcagtctcagcttactgtagcctcgacctttttggggctcaagttatcctcctttctcagcctcccaagaagctggactacaagcacgcaccaccatgctcagttaattttttattttttgtagaaatggggtttcaccatgttgtccaggctggtctcaaacttctgggctcaagtaatcctcctgccttggcctcccaaaatgctgggattacaggcatgagccaccgcagccagccttggctatttttcaaaaggatataagtagaacatctgtatatcccttcaatttgcatattattcagtaagagttgcactctggtagtagaaatatataaggaggagaaagaagtggaaacaaaaagtctattctcatgagaagacttgggggatagtgttctctctagctccaagctacttattccttacgaaaagttgaagataaacttatctcagactgaggctgtctcaatgttgtcttcctattccattatacacatataacccatatttttttcaccagctgaattttgctcctagaaaattgattcatcaggaaaaatatccgtcttgcaaggtggttctctttagagtctgctgtgtgacatagctcaggacaaattgtgtgatgtcagataggttgggttaaggaatagaccttattggggaaagagagaacttggagggccaaggttagcaggagaaggaaatgttctctcatctgccgtcaattcagggaggggcaaacctggtgtctgtgttcacagggagggatccatccatctgtgattctcccttcttatcaggtagcatgggaaagctacactgttgcggggaggagggtcacacgcaggctacttagtaccaggcaccctggacttggattcaggttgccagttgtgtgagaaactgcccagcacctgaaggccctgaacccatgagaagttgtacctacctcccatgaggaggaatcctgtcatcccatgggagctgagcttgggtgcagtccctcttgctggcttgtccaggagtgagctccagggttgtttgggacagttctgctcattgctttacactgtgtatacattatctgtagagttccatgaagagaacttcagcactgtaactgcaagttttaacatggaacagaatttttctcacctgtattaattcttaagatttgaagttctatcaacaagcatttagattgtgtggagatttttttatttttatttttggagacagagtcttgctctgttacccagactggagtggcagtggcatggtcttggctcactgcaggctctacttcctgggttcaagcgattctcatgcctcagtgtcctgattagctaggactacaggtacacaccaccatgctggctaatttttgtatttttagtagagacgaggtttcaccgtattggtcaggctggtctcgaactcccagcctcaagcagtccacccacctcggcctcccaaactgctgggattacaggtgtgagccaccatgcttgactgacatcatcatgttaaaagaataaatgttctagggagctgggcacagtgtcatgtttctgtagttctagctgctcgggaggctgaggcaggaagatcccttgagccctggagttcaagtccagcctgggcaacatagtgagatctctttttttaaataaataaataactgttctagggactaaaatttcctttcaccattagtaatttactgtagaatctccaagaatgaacttattttaggtactgaaaatgagggagactaaatgttttatacagtagtttttagtaaaatatgagatttgatgcatttgatagatgatgtttgtttaaaataattcttaaatttttgatcatgtaattatagtttcattaatggtagatttgtaaaataaatgttaccaaatgaaaatgcatgtacctatgttaattatccttatctaaagctgaaagttcagttcaactatgttaaaacatagtaggggcctggcagggtggctcttgcctgtaatcccagaacttagggaggccaaggtgggcagatcacgaggtcaggagatcgagaccatcctggctaacattgtgaaaccgtatcgctactaaaaatacaaaaaattagccgggcatggcggtgggcacctgtagtcgcagctacttggtaggctgaggcaggagaatggcgtgaactcaggaggcagagcttacagtgagccgagatcatgccactgcactccaggctgggtgacagagcaagactccatctcaaaaaaaaaaaaaaagttggccaggtgtggcggctcacacctgtaatcccagcacttttggaggccgaggcaggcggatcacaagatcaggagtttgagaccagcctggctaacagagtgaaaccctgtatatactaaaaatacaaaaattagccaggcatggtggtgcatgcctgtagtcccagctacttgagaggctgaggcaggagaatcacttgaacccgggaggcggaggttgtggtaagctgagattgctccactgcactccagcctggacaacagagcaagactctgtctcaaaaaaaaaaaaaattaatgattaaattatttaggggagccgggcgcagtggctcacgcctgtaatcccagcactttgggaggccaaggcgggcggatcacgaggtcaggagatcaagaccatcctggctaacacaggatgaaaccccgtctctactaaaaatacaaaaatttagccgggcgtggtggcgggtgcctgtagtaccagctactcgggaggctgaggcaggagaatggcatgaacccgggtggcggagcttgcagtgagccaagatagcgccactgcactccggcctgggtgaaagagtgagactccgtctcaaaaaaaaaaaaaaattatttaggggaagatactatacaattctgtttaacaagtcacattttaattttttcttttggaaatattagcaagaaggctcactttgtgctcaacattgcctgaataacttattgcaaggagaatattttagccctgtggaattatcctcaattgcacatcagctggatgaggaggagaggatgagaatggcagaaggaggagttactagtgaagattatcgcacgtttttacaggtactgattttaaactcactaagtcacatttcttttttttttttttttttgagacggagtctcgccctgttgcccatgctggagtgcaatggcgcgatctcggctcactgcaacctctgcctcccgggttcaagcgattctcctgcctcagcctcccaagtagctgggattacaggcacacggcactatgcccggctaattttttgtatctttgttagagatggggtttcaccatgttggtcaggttggtctcaaactcctgaccttatgatccacctgtcttggcctcccaaagtgctgggattataggtgtgagccaccacacccggcttacatttcttttaaaaatgtggataccatttagaaaaggatgggccattcttcctatagggatctgactggtgaattataactgtgctgttaactttggaaatgggaatgcacaagatattgttttaaatatgcacgctaatgacagtttgtatccttctttccccacccccacccttgcttcaactacctgtcaaaattaacagcagccttctggaaatatggatgacagtggttttttctctattcaggtaagtagtcacaagcatgtactatgtgttgcttacatcccaggcaccgtttcacagcctttcaatagtcactgtaacaaggcgaccttcggaagttcttctgtctacagagtatagattatactctagagtactagattttttttttcttgagacagagtctcgttctgtcacctaggctggagtgcagtggcgtgatcttggctcactgtagcctctgcctcccgggttcaagcgatcctcctgcctcagcctcccaagtagctgggattacaggcacccgccaccacaccagttaatatttgtatttttagtagagatagtggggtttcaccgtgttggccagtctggtctccaactcctgacctcagcctcccaaagtgctgggattacaggtgtgagccactgcacctggccaactagagtactagatttttatatagataaacatgaaaggattgtagaatcttcatattagagtggggcatttaaaaattccttcttgagaaagattaatttgcatctggatgctaataataaccttaattctggccgggcgcggtggctcacacctgtaatcccagcactttggggaggccgaggtgggcggatcacgaggtcaggagattgagaccatcctggctaacatggtgaaaccccgtctctactaaaaatacaaaaattagctggacgtggtgacacgtgcctgtaatcccagctactcgggaggctgaggcaggagaatcgcttgaaccagggagtcgtaggttgcagtgagccaagatcgcgccactgcactctagcctggtgacagagcgagactccatctcaaagaaaaaaagaaatccttaattctaataagtcacaatgtctcaaacttaccatctgttgggtaaatttgagaaaatgcaataccttgctaccatccttttaaatcagcctaccagactggatttccttattatggtttgtggcttttgattttttttttttaatgtatagctctctttgaattctttggtggttatatatatatgtactcgcaagattcttttatctgtgggtctttcattctttttctaacactgtgagttgtatccagagtactttcggaacctctcctgagcgacctatctctgcagatatctttgtttatgtttcccttgtactgccctcctggactcttcctcatccaccagcatttccatctagtgctttaccgtgccactgctaacaggtaatggctactgcagggctgaaatcagaggccagagtaggcccagcacttggcgtttcctatttgtgccttgctgctcttggtgcctgttcatgtgtgcccactaccttgcactcaatttctgtctttgctggtacctggctcacttgcttctttgttggctaccttggagggcagatagtgaattttcagaaatttccctttttttgtcagacagattgaaataaacaggtttgcattttgttttttctacaagcggcaagcccatgaccctagaagtctgacatctatggaaccttcagtttaaatgcccagggagaacttattttggtagatatgatttctgacattgcaggtagcaagttgaatataatttttctaaagtagcacccacagcagccaaattatcagatgtatatagtagactagttttaagaaaagcacttatgggtagaatatacatctggatttttgaggcagttttatttaggaattgtgtggttttctggaacatctcagagacctggtatgaaaagcactcttctaatatatatgtgtttttttttatggatttagtgatatatctatacacacacactttttaaaacctatagccggctgggcgtggtggctcatgcctgtaatcccagtactttgggaggcccaggcgggtggatcacaaggtcaggagattgagaccagcctggccaacaaggtgaaaccctgtctctactaaaaatacaaaaatagctgggtgtggtggcgtgtgcttgtaatcccagctactcgggagcctcaggaggagaatcgcttgaacctgggaggcggaggttgcagcgagccgagatcgtgccactatactccagcctgggcgacagagcaagactctgtcacaaaaaaaaaaaaaaaaacctatagccttctagagaaatttatatatgaagtacacaactaacatagctacacttcctaaatttggaatggagtggtttagcttatgaaaagttgctatttttcttaacaggttataagcaatgccttgaaagtttggggtttagaactaatcctgttcaacagtccagagtatcagaggctcaggatcgatcctatgtaagattctgttttgcatttcatacatttcttttcccaaatttgatttttaaagttgtaatttcttaaagaagagaaatacattttgaatacttttgttttgatgttccctgtttcattcactcagactttcctatttcacctttgtgatgtccatgagcatctgccctgtagccttcctggcaccccagtgtctgtggcagcacagagctgaccccataagtggtgcatgaggccatcttgtggcacagcatcactaagctgctgcagagacgttcatatggttgtgtgatcttttaaaaacatcagtgacacttaactataaatataatcttaaattatcacaaattttatataatatttgccagtagacaacataaatatgaattcaatatttcaagttaatattgtctgttttcttttttagaaatgaaagatcatttatatgcaattataaggaacactggtttacagttagaaaattaggaaaacaggtaacatttcttacccttccttgtctttttttcttatattgtaccccatttaaaactaaaatgtgggccaggtgtggtggctcatgccaacagtttgggaggctgaggtggggggatcacttgaagccaggagtttgagaccagcctgggcaacaaagggaggtcctgtctcttaaaaaaaaaataaaaataaaaataaaaataaataaaaaaaaaaacaaagagccaggcatggtggctcacatctgtaattccagcttacttggaaggctgagtcagaaggatcacttgagctcaggagtttgaggctgcagtgaactatgattttgtcactgtaccccagcctgggtgacagagtaagactgttctataaaacataaaaataaaaaaaatatatttaaaaattaaaaaaaaaaaaggattgctgactttaaaattaggaaactgaccagtaatgtgtgtgtgtgtagcatggtttatccttcttgatagatagaaattgtcattttaaaagataatatcagttttccttataaatttatttgtgacaagtatatgcaatttaactatatcataagaaaaattctatattaaagataatacaaatgtggttacttttaagtgggtttttatgtgatgactatgttctgtcagttaattattacatttatagatttgtatttagcatagtgctgtcacaaagcctgaaatagtgtcaagcatgaataaagcattcaattatgtttgctttagtgtaagattattcattatgattccaaaagccatgtaatacgtacgtctacagaaaatcacttctattttttaaataaaacatgaaatatgtcttgagcaagctattttaagaaacaatcatttaacgtccttgttattagaattttgaatctttgaaagagggttattgaaaaccagctaggacagtaaaaaagaataaactagtgatacatgcagcaatatggatgaatctcaaaataattatgctgaaagaataacccacaaacaaaatactacctgctgtatggtatcatttattaaaagtctagaaaagtgcagattcatctgtagtgatggaaagcagattgaccagcggttgcctggggacgagaaggctatggaggagtgagaggggagggttacagagaggcacgggaaacatggcaatgaggaatgtgttcactatcttggttgtagtaatggtttcatgggagtacagtatacaaatgtgaaaacatttcagaggccagatgcagtggctcatgcctgtaatcccagcacttttggaggccaaggcaggaggattgcttgagctcaaggagttcaggaccagcctgggcaatggcacaagaccccatctctaaaaaaaaaatgaaagaaaaaaaaattggctaggcgtggtgatgcatggccgtagtcccaggtgctagggaggctgaggagggagcacagaggtcaagcctgcagtgaatcatgatcgtgctactgcactccagcttgggtgacagaaggagatcctgtctcaaaaaaaaagtttcaaattatacactttaaatatgtgcagtttattatatgtcacttataccccaataaatctgttttttttaaaatgtaaatacaagccaaaaaaggtataagtcaagaaaatatattgaattaaatctgtaagagataattcaaaaacaaaaaccctattgttatcttttaagtcacccaaatcaaatttgggaaaagtcacctacttagcttcatcctaagttggttctttctttctttctttccttcttttgagacggattcttgctctatcgcccaggctggattgcagtggcgggatcttggctccctgcaacctccgccacctgggttcaagcaattctcttgtctcagcctcccaaatagctgtgtctacagccacgcaccaccacacccagctaatttttgtatttttagtagagacggggtttcgccatgttggtcaggctggtcttgaactcctgacctcaggtgatccgtccgtctctgcctctcaaagtgctggggttacaggcgtgagccaccatgccgagccctaagttggttctttcttaaagttcttcctgaggagccaagagcaagttaaggagatgtaacctagaagcttacagtggaggctagctgggtgcagtggttcacgcctgtaatcccagcactttaggaggctgaggcagggagatcactgaggccaggagcttgagagcagcttggcccaacacagtgacaccttgtctctacaaaaaaaaaaaaaaaaaaaggcagcttacagcagtagaggctgatgcgagtgggaatcacctctaggtaaaaaccagtgtagcgtactgctgagattatttaacctctgggttttatttatgtgtttttaaaaattatgatccagtattttttacttttttttgtataaagtaagcactgaatttttaaggttgtattaatttgcaaataaatgtctatcttattattttgagagatttaaaaaattttagttcttcaaaattgcattttcacattttgaattacgttatctttgacaaatacagaagatgtcaaattttggtttattttctttggttctaatttatatttttgtttaaaactatatttttcactatagactctttctgtctctcgaggtccctgtataatgaaaaagaaggctggaaaaagtattaacattgtcaaaatccaggaaaagtagttggtcatgatattgatcgttaactttagaaactttttgtatcttgtgggttaaattaggattactatgtggtagtgataaatgatgttaattagggccgagtgcagtggctaacacctgtaattccagcatgtagggaggctgaggtgggaggatgtcttgaatccaggagtttgagaccagcctgtacaacatagtgtaagaccccttctccacacaaaaaaattagaaaatttgtcaagcatcttggtgcacacctgtagtcccagctgcttgggaggatgaagcgagagaatcacttaagcccaggtgttcgaggctgcagtgagctatgattgcaccactgcactccagactagatgaccatctcttttaaaaaaatgtgtttatatgttatatgtgatagtgctttttaaaaacatttttaaattatagagacagggtctcactatgttacagcccaggctggtctcaaattcctgggctcaagcaatcctcccaccttagctaacctcccaaagtgctcggattataggcatgagctgcatgcccagctaatttagtgatttttaaaaactgagctggtaattataaattctcttcctggaacttctgactttctcacaattggaatcttttgacaaaaattatcagtaatgggaaaactttgtgtagttgtcatttttcctcccatcagtgtgatagatatgattggagttatgttggactgatattttgaaaaaagatttaattatagctattaataaagacatttaaactactgactatgcatttttattcttttgggagggtttaatgtttatagtttaaagcaaactgttgtttttaaaaaagtatctaacagggccgggcgcggtggctcacacctgtaatcccagcactttgggaggcctaggcgggcggatcacaaggtcaagagatcaagaccatcctggctaacatggtgaaaccctgtctctactaaaaatacaaaaaaatagctgggtgtggcggcgtgcgcctgtagtcccagctactcgggaggctgaggcaggaggatggcatgaacccgggaggcggagcttgcagtgagccgagatcgcgccactgcactccagcctgggcgacagagcaatactctgtctaaaaaaaaaaaaaaaaaaaaaaaaagagtatttagcagaggccaggtgcagtggctcatgtttgtaatcccagaactttgggaggctgaggcgggcggatcatttgaggtcaggagtttgagaccagcctggccaatgtggcaaatgtgctgtctctaactaaaaatacaaaaattagctgggtgtggtggtgcagacctgtagtcccagctacttgggaggctgaggcaggagaatcacttgaacctgggaggcagaggttgcagtgatccgagatcatgccactgcactccagcctgggttacagagtgagactcttctcaaaaaaaaaaaaaagtatttaatagtgataaatctgcagtattctcttgtagtttttaagatcatattattcagtcaaagaaaagagctcaacttgaaatatttccagagtttaaacaatcttactaagctttgatgggttgtatctattcttaacatgtgaaacttccttattacctataatatacactaacttaaatattgacaatttttttccagtggtttaacttgaattctctcttgacgggtccagaattaatatcagatacatatcttgcacttttcttggctcaattacaacaggaaggtaagtaacggctgaacattttgtaatgttacctttcgaagtagttaaataaccaggcacattagatgacagtgtgataaaactgtttttctggcagtggcagtgaaacaatctttagttttgacgtggtgataggctgtgatttgggtgacgctgttcagttagagttctcactgacacctggcccttcctcttctgaggatgctgctttctttgcagcccttctaagtaatggctttttcttttatacatcacatatcacacggctgagaggagggatagatgtttttcttctttgcctcttctaggccactgttcttccttataaactccagtttctttgaaatacatgcccctaacggctgggcacggtggctcacgcctgtaatcccagcactttgggaggctgaggcaggcggatcacgatgtcaggagatcgagaccatcctggctaacacggtgaaatcctgtctctactaaaaataacaaaaaattagccggggtgtggtggcggacgcctgtagtccgagctactcgggaggctgaggcaggagaatggcgtgaacccaggaggcggagcttgcagtgagctgagatcgcgccactgccctccagcctgggcgacagagcgagactccgtctcaaaaaaaaaaagaaaagaaaaaaaaaagaaatacatgcccctagattaaactatcccttgtccttttgcactcatccacaagtctcttttcatcagtgattttaggatctgactcgttgtctttttctctacttcaactacttttatcattcttaattatttctgtatcgtcaatcaatccagtacctgcctcttagtttcaaaatcacttactcttgcttagctattaccagtaatcataaccactgtcaaatctcaattgcaagcatattactctttaactaccacctcctatctttaaaccatgttttgtctgtttttttattccagccattctttaaaccctactgtggggcccaagcatttcctttatacgcattcttcctttcttctactgcttattttctgtaatccgtcatcataatcactccattgcattcttcaacgtgtttcccctctctccctccatcatacttgaatgacaaaaatctcaaccctggttaaaccacatcttggccttgtccattcctgtaccagagtagctggacgtggctaaaaaataacataaaacatgatgattggttttacttttttcttaaatgatctatccatccattcacccatccatctatcaaagtgactaggcctatttctgaagcccaggctggagtgcagcagcataatcacagctcattgcagctccaaactcctgggctcaagtgattctcttgccttagcctgttgagtagctgggactacaggcttgtgctaccacacctagctaaggttttactttaaatttattataatcacaaaattcagatgagcctttagtgctgtctgatatttctactatgttttcttagtgatgtaccaccctccaaggtgtttataaaaaattatgtaccactctccaagaagtttataaaaaataatgtgccaccctccaaggtgactaatttcacagcttatgtctttaaacctttaagcactttcctctcccttacacaccttccttgtggctttccgttacattctgctgagaacatagaagcaattaaaattatgttctttctaccagcaaatttatcaatttgcttatatcttcacctgtgctttgagcctatttaaatagatgaatggtcccctacctctaaccaaaaccagtccctcacttgtgggctggatcccagctcttctcacctactcaagatgttcctgctttcatctctccactctcttatataatcagttccccccccctttttttgtaatattcctataagcagtaaaataagctttttatttccattgattaaaaataaaaatcctctcttaattccatgaaactccagctgcctccccatttttattttttccttaggattgtctctagtgtgccttctccttttcttgaactctgcctcctgggttcaagcgattctcctgcctcaacctcccgagtagctgggattacaggcgtgcaccaccatgaccggctaattttttttttttttttttgagatggagtttccctcttgttgctccggctggagtgcaatggcgtgatctcggctcaccgtaacttctgcctcctgggttcaagcgattttcttgcctcagcctcccgagtagctggatttacaggcatgtgccaccatgcctggctaattttgtattttagtagagatggaaggggtttctccatgtttgttaggctggtctccaactcctgacctcaggtgagccgcccacctcggccccctaaagtgctgggattacaggcatgagccactgcgcctggccccggctaaattttttttttttttttttgtatttttagtagagacagggtttcaccatattggccaggttggtctcgaattcctggcctcgagtgatccacctgcctcagcctcccaaagtgctgggattacaggcgtgagtcaccttgcctagccatcttttagtaatggtatttggagatcacaatttgagtgctggcatgcttattgctgctgggtttgttatgtagttattgtgaattcacatttaggaatatagggtttttaattctttgattttagatacttgtatcttttttcttttatatttaaaaccttggttcctgatgatatcccttcttagaaaccctgtctacctttggccttcagcccaccatgctgtggttttcctaacttgctgcctgcacttttcagattcctttcatggatcttaaatatcatctgtaaataagatctatgtgtcaataattaccaaacttttatctttagtcttgacatctaccctgaacacctagctttgactaactcctagctttggcatctccacttggaaatccaaaaagtgtttcaaactgaacatgtctatgaaagacttatttttttctctctatccatgctatccatcaggttttccatttccataagggtgactcttgtactctggttcctatatattataccgacagagcagcccagagtgcttcttaaccagtgtaaggcctgttatgtcccaccctcactctttgtccttcagtggcttcccagcacacttagaataaaatctgaagtcttaggccgggcttggtggctcatgcctgcaatcccagcactttgggaggatgagggggcagatcacttgaggtcaggagttgatgagaccagcctggccaacatggtgaaaccctgtctctaccaaaaaatacaaaaattaactgggtgtggtgttgtgcacctgtagtcccagctactcgggaggctgagataggagaatcacttgaacccgggaggcagaggttacagcgagccaagatcataccactgcactccagcctgggtgacagaacgagactctcaaaaaaaaattaaaaaaaaaaaatatgtgaagtcttgaataaaacccaagatctttaccatggcccctgaacagggcagagtatccattcttcagacactcttcatagaataccatggtgagctggcatatttattatacaatacagaaacaattttactggcagaaaacacattaaaccgtctaaactctgaatacagttgtcctcataaaaaatgttcaacatactattttgaggttttccattaatagttcttataatctttgtcccattatgtgttaatccaacaaaggatatccaataacaaacaccaaagtttaagaaaaatgtgctaggcgcggtggctcacacctgtaatcccagcactttgggaggccgaggtgggcagatcacctgaggtcaggagttcgagaccagcccagccaacatggtgaaaccctgcctctcctaaaaatacaaacattaactgggtgtggtggtgggtgcctgtaatcccagctactcaggaggctgaggcaggagaatcgcttgaacctcctgggaggcagaggttgcagtgagctaatattgcaccactgcactccagcctgggtgacagagtgagactccatctcaaattaaaaaaaaaaaaaaattaatgatagagaaacttaaatcagttagattgttttaggtatagcccatccttggtttttgtgtgtagcatctagcttggggaaaccctggatttctggaatcatatttagacacagtcacactagactaatgtaattcttttgggatgcaaaccacacgtttgacaccttaaatagcttttaggtatttggcttcccagcccctatttttagttacaaggggtgtacatgtgtgggtcagggtgggggtagctctttccgcagatgattagttttagccatgttactagttattgcacacattatctgtgtcctcacagcagccctgtgagtaagtgtattagggttctctagagggacagaactaataaggtagatgtatatatgaagggtaatgtattaaggagtatcgactcgtatgatcacaaggtgaagtcccacaataggctctctgcaggctgaggaaccaggaagccagtccaagtcccaaaacctcaaaagtagggaagctgacagtgcagccttcagtctgtggcaaaaggcctgagagcccctggcaaaccactggtgtaagttcaagagtccaaaagatgaagaacttggagtctgatgtttgagggcaggaagcatccagcatgggagaaagatgaaggctcagcaagtctagtacttccacactcttatttctgcctgctttattctagctgagctggcagctgattagatggtgaccacccagtttgagggtgggtctacctctcccagttcactggcttaaatgttaatctcctttggcaacaccctcgcagacacacccagaaacaataatttgtagccttcaatccaatcaagttgataatattaaccatcacaggaaggtactagtatcatatgtttaacagtagaaaccaagacaaatgcagctaggaagtgggagaactgggatcagatgcaggcagtctgattctaaatcagttgctgttacccactctgacaacagtaagtgagtagcctgctcagtcaagtactatattagtagggccctttacagacatatttatttctcacagtcactcaatgagacggctcttccagtcttacaatggagaaagtgaggctcagagactttaagtaacttaccttagacgactttactagtaagtataagaatcattatttggactaaagtctttctgaatcctcagcttgtatttttttccagtgttctgtgctgcctttttatctactagtgttttacatcaattttgaatctctttactaactggttaggttgatttttgccttttttttttaggttattctatatttgtcgttaagggtgatctgccagattgcgaagctgaccaactcctgcagatgattagggtccaacagatgcatcgaccaaaacttattggagaagaattagcacaactaaaagagcaaaggtaaaaatgaggcctgcagtatggaatatatggtagtatttcattatgagaattaaattttcatgcttagattgaatatgtggtccttgtgttgttggcgactctattttggaccttatattttagtgaagtttattagtttaaacttgaatcaactctttgaaatacttaaatatattaacttagttagctggtatggtatattcctagcacttcgggaggctgaggcaggctgattgcttcaacccaggagttcgagaccagcctgggcaacatggcaaaacctcatctctacaaatagtacaaaaattagccagatgtggtggtgtatgcctatagtcccagctacttgggaggcagaggaagaaggatcacctgaaactggggaggtagagactacagtgagccataatcacactaccgcactccagcctggtcgagagagtcagaccctgtctcaaaaaaaaaaaaaaaaagaaacggaaaaaaaaaacttagttggattcaaattgcaacacaatcattatattactagagcttatttgccagaaaacattttaagttttgacttacttaaagcctttacattacaaatgcctttatgttatgtctaaaatagaagattggttgcagttattaccagtgcttttgttctttagagtccataaaacagacctggaacgagtgttagaagcaaatgatggctcaggaatgttagacgaagatgaggaggatttgcagagggctctggcactaagtcgccaagaaattgacatggaagatgaggaagcagatctccgcagggctattcagctaagtatgcaaggtaaagacattctgatgtgtgttgtattcattgctgaagaattgattccaattattcttagatttcatggaagttaatgtactcttagaggtgttttgacaattactgcagaagcaatagctatatagtgggctttccctttagatttcttataatggaaatcactttttacaacctatattttattaggagtagttatatttttactcctggttattttatttggtttcaacactgtactaacacaatagtaaattgtggttttaatctttgtgggtatcagttgacccttatccaaatcagctgttacataaatatgtgccattagacactatggaagggcctggacagggaatataaactgattttacaaaaacccaacatttattggctatgcaacttaaaccgtaagcccactttggtgggcccagttttttagtgatataaactatcaatagagaaaagcgaaaacatatcccctagacaatctaggcaaagaaaaatgttaagacatagctcaaagtagcttaattaaaagtttgaagtgggttttttgttttatttttttctaactcatatgtatttgcttctactttctaatgaaattatttatcagttgatttccttagatatctaaataaaattgaaatttcattaatgggaagattatttttatcctgaacttttcttgcctctatgcatgcctctgagtactccatatggtgtgcaatcccatttttgattaatagagtcctgctggattagcagggacagaaatcagctttagatttctttcttttttttttttctttctttttttttttttttttttttgagtcagagtctcactgtcgcccagcctggagtgcagtgatcttggctcactgcaacccctgcctccgaggttcaagcgattctcctgcctcagcctcctgagtagctgggactacaggcgcctaccaccacgcccagctaattttttgtacttttagtagagatagggttttgcccttttggccaggctggtcttgaactcctgacctcaggtgatccacctgccttggcctcccaaagtgctgggattacatgtgtgagccaccacgcccagccagaagagtagaatattcttaaagagaaaacgttttaaaggcttactcaaatgagtataaacaaacatattgttgcttgaattggtaaatacagtgattggtttttgttgtgttgtgttttgttttcaggtagttccagaaacatatctcaagatatgacacagacatcaggtacaaatcttacttcagaagagcttcggaagagacgagaagcctactttgaaaagtaaagtagttggtacaagttaaagtagcatgtttaatatttgctttggctattttgtctatttgtaaatggttactgcctgaatcctgtgaatatttgaatgtattttttaaaaatttacagcaaataggacgggcacggtggcttacgcctgtgatgctagcagtttgggaggccaaggcgggcagattgcctgaggtcaggagttcgagaccagcctgggcaacacagtgaaaccccatctctactaaaaatacaaaagaatcagctgggcatggaagcgtgcgcctgtagtcccagctgcttgggaggctgagccaggagaattgcttgaacccgggacgtggaggttgcagtgagccgagatcgcaccactgccctccagactgggtgacagagtgagactccgtctccaaaaatatatgtatatatatataaataaaaataaaaatttacggcaaataacatgaaacaaaaaaaccttgccccaatactggataaattttttaaactgagtgaaggaaaccttataaaatttcatttattaaaagaaaaatgaaattaggacaagacaagaagaatgccaattgatcctttggatgtacttcttgcttacctgattaaccctgcaaaattcctctaccaatcagtacgaaaaacagctttggaggtatgggagcgcattcccaaatagacgtggtagttcatttagctgctcatggccgcttcaggcagtcctgtaagcctgttagcatcaggggaatggatgcaaaccataaatctggatcaactcctaaaaccttaccttgtgcccagccttgtaagtgcttgctaaataggaattccaccatatgaaaatacattcttttcaagtaactatcattcagacttttgtcccccactttttttttttaaagaaaaataaaaggctgggcacggtggcttacgtctgtaatcccaccattttaggaggccaaggcaggtggatcacctgaggtcaggaattcaagaccagcctgaccaacatggtgaaacctcatctctactaaaaatacaaaaattagccgggcatggtggtgggtgcctgtaatcccagctacttgggaggctcagacaggagaatcgcttgaatctgggaggcagaagttgcagtgagctgagataacgccattgcactccagcctgggggacaagagcgagacttcgtctcaaaaaaaaagagaaagaaaacttcatgttaaagattacaagataaataatcagacccactgatcctaggtcagaaaacagagtcatagctcaatctgacttactatttgctgtatttcatccattctgagatgcacatagtttcacatttcaatgtctctgaaattgagaagcatcttacagtcataattgacagtatattagcagcacctataaatattggctcattttacatttgatggtataatgaagaaaatatttacctttttttctgttttgtttttaagtcacaactcagaagtagatgaaggaaaattctgatcagctgacatcctcttaatgtgagatatttctagtctttattcagtatagattaatggctaattatatgttaaatttcaaagtagtgcttattagtgctttttacttttaagtttcaaaattaacttttttattataataaactccaaatttatacaaaagtagaaaaactagcatactcctgtttatgacccagattcaacaaatactagcacacggccaatcttgcttttttttttttttttttttgagatggagtcttgctctgttgcccaggctggagtgcaatggcacaatttctgctcactgcaacctctgcctcctgagttcaagcgattctcccacttcagcctcccaagtagctgggattacaggtacacaccaccatgcctggctaattcttgtatttttagtagacacgggatttcaccatgtcgtccaggctggccttaaactcctgacctcaagtgatccacctgcctcggcctcccagagtgctgggattacaggcatgagccactgagcccggcccaatctcgttttataatactcccatctcccattctttccactgtcccacctgcaagtttggattattttgtaacaaatctcaatcatcatattattctataaccattttaatatgtgtctctaaaatatattagctttatttttaacatagttaaatgctattgtcataaaataataatcataataattaattgtaattctatatcatcaattatctagttaatgtaaaaaataaatctaaggccaggcgcggtggctcacacctgtaatcccagcactttgggaggctgaggtgggcagatcacctgagatcaggagttcaagaccagcctgaccaacatggagaaaccccatctctactaaaaatacaaaaaattagccaggcgtggtggcgcatgcttgtaatcccagctacttgagaggctgaggcaggagaatcacttgaacccgggaggcgaggttgcggtgagccgagatcgtgccattgcactctagcctgggcaaaaagagtgaaactccatctcaaataaataaataaataaataataaaaaataacttaaatctacttaattagaaaaactaacattctaaaaattttattttaagaaatatcaaaattggctgggcacggtggctcacgcctctaatccctgcactttggaaggctgaggtgggcggatcacctgaggtcaggagggtcaggagtacaagaccagcctggccaacatggcgaaaccctgtctccactaaaaatacaaaaattagccaggcatgatgatgggcacctgtaatcccagctactcaggaggctgagacagaagaatcgcttgaacccaggaggtagaggttgcagtgagctgagatcaccccactgcactccagcctgggtgacagagtgaaactccgcctcaaaaaaaaaaaaaagagaaaagaaatatagaaattaaagcatacatggccaggcgtagtggctcatgtctgtaatcccagcactttgggaggctgaggcaggcagatcacttgaggccatgagttcaagaccaacctggccaacatggcgaaagcctgtctctactaaaaatacaaaaaaattagttgggcatggtggtgcacacctgtaatcacagctactttggaggctgaggcaggagaatcgtttgaacccagaggtggaggttgcagtgagccgagattgtgccactgcactctatcctgggtgacagagcgagatactgtctcaaaaagaaaaaaaaaaggctgggcgcggtagttcatgcctgcaatcccagcactttgggaggccgaggcaggcagattacgaagtcaggagatggagaccatcctggctaatacagtgaaaccccgtctctactaaaaaatacacaaaaattagctgggtgtggtggcaggcacctgtagtcccagctactctggaggctgaggcaggagaatggcatgaacccgggaggtggagcttgcagtgagcagagatcacaccactgcactccagtctgggcgacagagcgaggctctgtctcaaaaaaaaaaaagaaagcatactctcacctccttcagtgactgatgttagtattttggcacattctttttctgtgacatatacacacttaccttgtaagtgttgtactcatttcctatgacagtaaatagtctttgtaacaggctgcatgatatttcataaaatgaatggatgtggcataatttatatgtgagccttttgaattctgctattataattaatattgcaatgaacaattcttatattgcctctacacctcaaatgtcttatcatttcttctagtttttctgaggatgtcagattattgggttaaaggatatgaacatttttaaggccttggaacagatttctaaattgctttccagaataattcccatgtgatactttcaccatgtttatttcagacttttttttttttttttttttgagacgaaatctcactctgtcacccaggctggagtgtagtggcatgatctcggctcactgcaacctccgcctcctgagtttaagcgattattctgcctcagcctcccaagtagctgcggttacaggcaagtgcctccatgcctggctaatttttgtgtcttttgtagacatggggtttcaccatgttgcccaggctggtttcgaactcctgagctcaggcaatctgcctacctcggcctcccaaagttctgggattacaggcgtgcaccaccgcgcccagccatcagagtcttttttgtcaaaataaaatggtctaaagacatacatcatagagaaactataatacaaaatttacaggtatatctaagaaaagaaaagtatatttaaagcataaaaataaactgctcttttacttaaaattttttaaaaactggattaaaaatatgaaacttccaacaaattgagcttttttttttttttttttcttttttgagacgaggtctcgcttttgtcacccagtctggagtgcagtggcgcgatctcggctcactgcaacctccacctccctggttcaagcaattcccctgcctcagcctcccaagtagctgggattacaggcgcatgccaccacgtcgggctaatttttttgtatttttagtagagagggggtttcaccatgttggccagactggtctcgaactcctgatctcaggcaatctgccagcctgggtctcccaacatgctgggattacaggcatgagccactgcactcggcctgaactttttatagtagtaacgataattcagtaatgtccaataatgactaagtaagttataacaagtacaatgtcagcaataactagtgctttttagtaaacagggtcaggcaaccttgtacccttttaaaaatgttcgaatatcgatatacctccttcctacttggtggaggattgattgaggaggaaagtgtgcagtgatggttaccagcttcagcctcttggcttgactttgcaaatactggtgagaatttggaaagagcttgagaatatcttacatagtcacatgttgctgagaagagttaagaactaacttcttgatgttcatttttaacaatggcttgcattcaaaaccttgtagagctcattagtaggagctaagaagctaatatttgcctttcactaaaattcctgattacttagcctaggtagttcgttgtctctctaggttctgtctttgggagcttgggtctaaggttatcaagctaactctttcttccctctcacccttcccaaattgaccctggtgctgatttgttattcatacgattttctagtttttcttttccctttttgagtatttgaagcttcatactgaatatagtaatcatagtattcatgcataaagaaaatcataaagtaattgcataaatgcataaagtaatcatagttttcatgcattaaaaaaactagttttggctgggcgctatggctcacgcttgtaatcccagcactttcggaggccaaggcaggcgaatcatctgaggtcaggagttcgagactagcctggccaacatggcgaaacctcttctctactaaaaatacaaaaaaattagccgagtatggtggcgggcgcctgtaatcctagctatttggcaggctgaggcaggagaatcacttgaacctgggaggcagaggttgcagtgagccgaggttgtgccattgcactacagcctaggcgacaagagcaagactccatctcaaaaaaaaaaaaaaaaaaaaaaaaactccctattacagattcataatttatgagtcattaaataatattttcaagccatgacattttttccagcagtagtctctaaatctgttttaccatcataaaaccccaagcaaaactctactacatcagctgtgtcactgtaaaacctgccttaactcacagaagcatgaaattaagcaatgtgtgtgaaactattttataaactgtaaagtattccatacatacatgttggcagttattaatgtcttctctaggtgtggctttgaaatggatgcagatgctttctgttacaaaaaacataagttgcaaatgttctataacaaggagagacacaaatatcttcatggacatggattgctatgagtgtttgattgcctaatacttgagccaccacttcagtgatatggtataatttatcaaacagtgttgagaaacagaaactactggggatgttttaaagaggaaaatacttaatatagaaattaggggtttacataatcttaagaaaggatgaaggtgcagctcttagccaggcctccacagtaccacaaaccaacttgcaggaagagctgtaaccactgccccagttgggacaatgggtaatgaggatattaaatttaagaacatactgctatagcaatgatccttggcatagaaagctgccaccacaattgcctagagatgggaacatgaagtctggcccccattgcaacagcagtgaagcagaattttgggactggcatctcccaaatggctttgcttgccaccagagaacaaccaaagtggagggagatggctaggcctcatttctgcctattttattttattttttgagacggagtcttgtctgtcgcccaggctggagtgcagtagtgtgatctcggctcactgcagcctccgcctcccagcttcaaacaattctcctgcctcagcctcctgagtagctgggattacaggcacccgccactgtgcccagccaattttcttatttttagtagaggtggggttttgccacgttggccaggctggtcttgaactcctgacctcaggtgatctgcccgcctcagcctcccaaagtgttgtgattacaggtatgagccaccatgcctggcccatttctcccttttttttttttttttttttttgaggtggagtctcactctgttgcccagactggagtgcagtggtgcaatcttggcgcattgcaacctctgcctcccagtttcaagcaattcttctgcttcagcctcctgagtagctgggactacaggtgtgtagcaccacacctggctaatttttgtttttgttttgttttttttgagacagagtctcactctgtcacccaggctggagtgtagtggcatgatctgggctcactacaacctccgcctcccgggttcaagcaattctcctgcctcagcctccagagtagctgggattacaggtgtgcgccaacacacctggctaatttttttgtatttttaatagagatggggtttcaccatgttggccaggctggtctcgaactcctgacctcgtgatccgcccgcctcggcctcccaaagtgctgggattacaggcatgagccaccgtgcccagacaaggtttgtatttttagtagagacagttttgccatgttggccaggctggtcttgaactcctcacctcaggtgatccgcctgccttggcctcccaaagtgctgggattacaggcgcaagccactgtgcctgacccgtttctgctttttaaagctcatgtgagcacttaatttgtaaccagaatcctacttgtaaaataatctaagacatgtagcttttagctttgtaacctctataatattgatggcacagtgggagtggatgctgagtaccacttgaacatgttccacctcagtgtcttcacagctggaaggtgtctacattgtttcaaggtggacaattgatttacttctcatttttcataaactaaaagtagaataaaggctattcctctaaaattgctatctcacctgtcactcccttgcattctcacataccttcttgagtggaggggcagagggcatggagtgatagcagatgtgccaggaattctccataactcagtccgtccctcttgtgctatgttgcagcatcaggatttgctaatgggaggatactgcccttacgtgcatcattagccatgcacactaaggtcttacacctacacacaggtcagtattctggctcagagaccaacagggagaaattgcagttctcattagttgaactttctttattgttcacagttttaaaacacaaaattgagaggaactctataaaaaatgtgccattctattaataattgttgctggtaatttaaaaatccttgttccttttcaaattcttatataccttttttttttaaacacttgatcttagccaaaagaccgagaagcaatcttttttttttttttttttttttttaacctatagcttctcactgagattgtcagctgtttgtaagttttggtttttggttttctgtgtttgtatttacatatatgaaatacagattgagtatcccttatccaaaatgcttaagactggaagtgttttagatttggggttttttaggatttgtgaatatttgcactatacttaccagttaagcattccaaatccaaaatttcaaatctgaagtgttccactgagcacctcttttgagtatcatgttggtgctcaaaaagtttctgattttggagcatttggatttctgattctcggatttaggatgcttgacctgtaatttcagatttacataaaagcagaaatagtacacagagctccttatatccttcacccagattccccaattattggcctttctgaaccatttgggaataatatgcagatatgattttccattatgtctcagttgttcagtgtatattttctaagtacaagaatatattcctacatatttacatgataaccgtcatgtttaaacattttaaaatggggatttgtattacattgtttctctttttgaaaaaattacagaggagcttaatgcaatcagtattacttaaaatctgataatgtgtgttaaatagtagttttcatttatttcatttatcaggtgttcagtgaatgcttactatgtaacagcacagttatcagcactggggaaatagatgagtaagataagatttgcactttcattagcttacatgccataaagagggaaataaagagaacaccagatgatgataagtttatgctgagaattaaaatgaagtgatgaaataatgggaatgtcaggtggctacttttggtgggatggtcaggaaaggcatctctggggagataaattttaagctcagacctgagtgaaaagaatgagccagccatggaaacattatgttaactcacatggtagtttgaaatgctttatctgatcaaaggtacttatttttggtgactttcaacaatattaagggtctataaaccaacactcatttgcataagaataactaccagtgaatctttttgtatgataggttttttgtttgttgtttttttgagacagagtctcgctctgtcgcccaggctggagtgcagtggcgcgatcttggctcactgcaacctctacctccccggttcaagtgattctcctgcctcagcctcccaaagtagctgggattacaggtgcctgccaccacgcctggctaatttttgtatttttagtagagatggggtttcaccgtgttgtccaggctcgtgtcaaacttctgacctcaagccatccacccgcctcggcctcccaaagtgctgggattacaggtgtgagccaccactcctggccatgataggttattttgtgatgaaaatacctacctcttaatttgtctgataaatttaaattttatgtctagatttcctaagatcagcacttccatattttaaagtaatctgtatcagactaactgctcttgcattcttttaataccagtgactactttgattcgtgaaacaatgtattttccttatgaatagtttttctcatggtgtatttattcttttaagttttgttttttaaatatacttcacttttgaatgtttcagacagcagcaaaagcagcaacagcagcagcagcagcagcagcagggggacctatcaggacagagttcacatccatgtgaaaggccagccaccagttcaggagcacttgggagtgatctaggtaaggcctgctcaccattcatcatgttcgctaccttcacactttatctgacatacgagctccatgtgatttttgctttacattattcttcattccctctttaatcatattaagaatcttaagtaaatttgtaatctactaaatttccctggattaaggagcagttaccaaaagaaaaaaaaaaaaaaaagctagatgtggtggctcacatctgtaatcccagcactttgggaaaccaaggcaggagaggattgctagaacatttaatgaatactttaacataataatttaaacttcacagtaatttgtacagtctccaaaaattccttagacatcatggatatttttctttttttgagatggagtcttgctctgtcacccaggctggagtgcagtgtcgcgatctcggctcactgcaagctctgcttcctgggttcatggcattctcctgcctcagcctcctgagtagctgggactacaggcgcccgccacatcgcctggctaattttttgtatttttagtagagacagggtttcaccatgttagccaggatggtctcaatctcctgacctcatgatccgcccgcctcggcctcccaaagtgctgggattacaggcgtgagccatcacgtccggccagaaatcatgaatattagtaggtgaaaaataaacacattttaccacctggaaaatgaaaaatacttgagtataatctaaataacaatgggaagtgcagagttactttccaggtctcggtttaaatatgtcttaaactttggccaattagtagtagaagttgagagaaaaagtaactatctgacaaagaaattataagcagaatatataaagaactcttaaaactgaataatcagaaaacaactcaataaaaaggtgaaggatttgaaaagatatttcaccaaataagacatagggatgacaaataagcacatgaaaagactctcagcatcactagtcacagggaaatgcacgataaaaccacagtgagacaccatggcacccctgtaggtatggctttaatgaagaaataaaactgacaataccaagtgttggcaaggatccaagcagctgagactcatatactgttaatgggaatgtaaaagtgtacagctttggaaaacagtttggcatttttttgataaatgtatacttagccatgtgatccagcagtcccaatcatgtatatataaccaaaagaaaagaaaacttaggttcacataaaaacttatatcaaatgcttatagctgaccaggcatggtggcccatgcctataatcccagcactttgggaggccgaggttggcagatacctgaagtcaagtgttcgagaccagcctggccaacatggcaaaaccctgtctctacttaaaatacaaaaattagccaggcgtgatggcaggcacctgtagtccagctattcaggaggctgaggcaggagaatcacgtgaacccgggaggcagaggttgcagtgagccgagatcgtgccactatactccagcctgggtgacagagcaaaactctgtctcaaaaaaaaaaaaaaaaaaaagggctggacacggtggcttacgcctgttatcccggcactttgggaggccaaggctgatggatcacctgaggtcaggagttcaagaccagcctggccaacatggtgaaaccccatctctactaaaaatacaaaaatttgctgggcatggtggtgggcacctgtaatcccaggaggctgaggcaggagaatcacttgaacccgggaggcggagattgcagtgagccaagattgtgccattgaactccagcctgggtgacaagaccaaaactccttctcaaaaaaaaaaaagattatagcatctttattcatcattgcccaaaattacaaactgcctaaatgtagaccttcatttagttaatgaatgcacaaactgtggtatatccaaacaattgaataaaaaaaggaatgaactggtacttttttctattcctcctgtttaagtacagccaaaacacctcaacatttgtataaaacatgagctgggctgggtgcggtggctcacacgtgtaatcccagcactttgggaggctgaggcgggtggatcacctaaggttgggagttcaagaccggtctgaccaacatggagaaaccctgtctcaactaaaaatacaagattagtcgggcatggtggcgcatgcctgtaatcccagcttcttgggaggctgaggcaggagaattgcttgatcccgggaagcgaaggttgcagtaagctgagattgcaccattgcactccagcctgggcaacaagagcaaaactctgtctcaaaaagaaaaaaaaaaccattcagctgaatctcaaaggcagagagaagacagactggctagggaccttggaaccagaggagcagtgtggtggggagtggactggattttctttttgcctcatttatcctggacttggtgctggagaagctatgggttcagaccaagagaaaaccccatgaaaagcctgctctctctagccaaaagaggcaacctagcaagataaaaacctttagataataagcacttgactccagtcaaacaaaacagaataaactggccccattcacccctgtcagcaaaggccaagtgggagccaagatatgtaccccaacctggaagtcataaggtacacttctcccctttcccagccaaggtggtgttagagaaggctgactggggagctgggattctcattccctccaggaggtgataacactcctttcacatggtgtcagtggtcacagggaggctgaacttccacccagtaatacataggcatctctctggctcctatatgggtgatgttggagaagaggccgagtagagaatccagactgttgctgacacccagcagtaacaaggacacctccacaatgtccgtggaggccatgtggagatcagtaacaaggcactgctctccctcccagtcagagagatgtcagtggaggactagggggctagaactcccatgtgcgttcagcagtaatccccatgaccgccactccttgacatcacaggccttgaagaaacctggactttcactcccctctggttgtagcgaggtggcactcccttttccctgttgccagtgctgtgtcagtggaggcttgctaaattggaagatgtaaataagattcacattctcataacataataccccaaattttcaggatttaattgaaaatcactaagctgggcatggtggctcacacctgtaatcccagcactttgggaggccaaggtgggccaaacacttaaggtcaggaattcaagaccagcctggccagcatggtgaaaccctgtctctactaaaaatacaaaaattagctgggcgtggtggcacatgcctgtaatcccagctactgggaaggctaaggcaggaaaatcactggaacctgggagacggaggttgcagtgatccaagatcgcactagtgtactgcagcctgggcaacagagcaagactccatctaaatttgtgtcaggattcccagaaggagatgagaaagggtggggctgaaaaaaattgaggaagaagtcatggctgaaaatttcccaaatttggcaaaagtcagaaacctacagattgaaaaagctgaatgaagctcaaatatgataaactcaaagaagttcacacagagacacatcacagtcagatttctgaacactgcagacaaaaaatgaagatctcgaaattagcaagaaatgaccttacctaagcaatttgaatgacagcagatttcccatcagagatcataaaggccagaaggaaggggtacatacaacattttttctagtgctgaaagacaaaaactctaggctgggcacggtggcacacacctgtaatcccagcacttttggaggctgaggcaggcagatcacctgaagtcaggagttcgagaccagcctggccaacatggggaaaccctgtctctactaaaaatacaaaaattagccaggtgtggtggcacgcacctataatcctagctacttgggaggctgaggcaggggaatcgcttgaacctgggaggcgacggttgcagtgagccaaggtcgcgccactgcactccagcctgggcagttgagcgagactccatctcaaaaaaaaaaaaattatccaggcttggtggtgggcgcctatagtcccagctacttgggaggctgaggcaagagaattggttgaacccaggaggtggaggttgcagtgagccaagctcatgccactgtactccagcctgggtgacagagcgagaccttgtctcaaaaaaaaaaaaaaaaaaaaaaaacaagaaaaaaactctaaacccagagttacatatccagtgaaatatccttcaggagtgaagggaaaattaacgatttgtcttcaggagacctaccctaaaagaatggctaaaggaatttctctaaacagaaaagaaatgataaaagaagtaattttggaacatcaggaaggaagaaagaacaataaaaagagtaaaatatgggtaaacacaatagactttcccctccttttgaattttctaaattgtatgatggttgaagcaagaattatagcactgatttggttttcagtatatatattggaaatatttaaggcattatgttacagatgaaggagggtcaaaggatataaagggaggtaacctttctatatttcttttgtactgatgcaggcactttggaaaataatttcactatttgtttaaaaactgaacataccctgaccatatgacatagcatctatactcctgggcatttatcccagagaaacagaaatttatttattttttttttagtattacactccgtaagtgctgtaatactagcacttagggaggctgaggcaagcagattgcttgagcccaggagttcaagaccagcctgggcaatgctgcacagtcaaaaaagaaaaacaaacatttagaaaactattttaaaagtctttaattgctgaatgcctctttggctaatatttggaagatcattattattatttttcttttttaggcagagtcttgctctgtcactgaggctggagtgcagtggcgccatctcggcttactgcaacctctgcctcccgggttcacgccattctcctgcctcagcctcccgagtagctgggactacaggcgtgtgccaccatgcccggctaattttttgtgtttttagtagagatggggtttcactatgttagtcaggatggtctccatctcctaacctcgtgatccgcccacctcggcttcccaaaatgctgggattacaggcgtgagccactgtgcccagcctggaagatcattatttagtcctacaactgacacattgttccactgacgcaattgcccaggctggtcttgaactcctgggctcaagcaatctgcctgcctcggcctccctaagtgctagtattacaggcttgagccactgtgcccagccaaaaatagaaatttatattctcacaaaaacatgtacatgaatgtttatagcagctttacttgtcataatcaaaaactggaaacaaccaaaatgtcctacagtgaaacaaactgtagtacatccatagcatgtaatactctactgtcaggattaaaaagaaacccactgttggcacaggcagcaccgtggctggatctcaggggcattatgctgagtgcaaaaaagcctcaaagggtcttacactgtatgattccacttgttcaactaaaaatgacagctgtatagagatagagaacatattagtggtttccactagttagagaaagtgggtaaaagataggtgggtgggaatataaatcgatagcagggagatctttgtggtattataacacttctatgtcttgattgtagtggtggtggttacatgaatacacgtgtgataaaatgccatgtagaactacatataacgttgtgccaatgtcaatatctaggttttagtttgatctttagttacataagatgtaactattgggtgaaattgggcaaaagagtacacgaaacctctcttaaatatctttacaacttcctttgaattgacagtttttcaaaatagaaagttgggtttttgtaaatacatgaattgttgatatacacaacaaatctcaaatgcattatgctacgtgaaagaagccatattcaaaaggctacatacctactgatgccttttatatgacgtgcaggaaaagataaaactgtaggacagagaatatactggtggctatctgggattaggaaatggggatcgaccacaaaggggcagcatgggggaattttctggggcaatggaatggttgtgtatcttgatggtgtatttgtcaaaatatatagaactataaaagtaaattttgctttatatgtattaaatcaaaaaaagaaactcgtgctcaaatagaaatacattttctgagaacttgccttttgatgactttgagaattttctggaaattttaaagaaatgtggttttgtttcccaacaggtgatgctatgagtgaagaagacatgcttcaggcagctgtgaccatgtctttagaaactgtcagaaatgatttgaaaacagaaggaaaaaaataatacctttaaaaaataatttagatattcatactttccaacattatcctgtgtgattacagcatagggtccactttggtaatgtgtcaaagagatgaggaaataagacttttagcggtttgcaaacaaaatgatgggaaagtggaacaatgcgtcggttgtaggactaaataatgatcttccaaatattagccaaagaggcattcagcaattaaagacatttaaaatagttttctaaatgtttctttttcttttttgagtgtgcaatatgtaacatgtctaaagttagggcatttttcttggatctttttgcagactagctaattagctctcgcctcaggctttttccatatagtttgttttctttttctgtcttgtaggtaagttggctcacatcatgtaatagtggctttcatttcttattaaccaaattaacctttcaggaaagtatctctactttcctgatgttgataatagtaatggttctagaaggatgaacagttctcccttcaactgtataccgtgtgctccagtgttttcttgtgttgttttctctgatcacaacttttctgctacctggttttcattattttcccacaattcttttgaaagatggtaatcttttctgaggtttagcgttttaagccctacgatgggatcattatttcatgactggtgcgttcctaaactctgaaatcagccttgcacaagtacttgagaataaatgagcattttttaaaatgtgtgagcatgtgctttcccagatgctttatgaatgtcttttcacttatatcaaaaccttacagctttgttgcaaccccttcttcctgcgccttattttttcctttcttctccaattgagaaaactaggagaagcatagtatgcaggcaagtctccttctgttagaagactaaacatacgtacccaccatgaatgtatgatacatgaaatttggccttcaattttaatagcagttttattttattttttctcctatgactggagctttgtgttctctttacagttgagtcatggaatgtaggtgtctgcttcacatcttttagtaggtatagcttgtcaaagatggtgatctggaacatgaaaataatttactaatgaaaatatgtttaaatttatactgtgatttgacacttgcatcatgtttagatagcttaagaacaatggaagtcacagtacttagtggatctataaataagaaagtccatagttttgataaatattctctttaattgagatgtacagagagtttcttgctgggtcaataggatagtatcattttggtgaaaaccatgtctctgaaattgatgttttagtttcagtgttccctatccctcattctccatctccttttgaagctcttttgaatgttgaattgttcataagctaaaatccaagaaatttcagctgacaacttcgaaaattataatatggtatattgccctcctggtgtgtggctgcacacattttatcagggaaagttttttgatctaggatttattgctaactaactgaaaagagaagaaaaaatatcttttatttatgattataaaatagctttttcttcgatataacagattttttaagtcattattttgtgccaatcagttttctgaagtttcccttacacaaaaggatagctttattttaaaatctaaagtttcttttaatagttaaaaatgtttcagaagaattataaaactttaaaactgcaagggatgttggagtttagtactactccctcaagatttaaaaagctaaatattttaagactgaacatttatgttaattattaccagtgtgtttgtcatattttccatggatatttgttcattacctttttccattgaaaagttacattaaacttttcatacacttgaattgatgagctacctaatataaaaatgagaaaaccaatatgcattttaaagttttaactttagagtttataaagttcatatataccctagttaaagcacttaagaaaatatggcatgtttgacttttagttcctagagagtttttgtttttgtttttgtttttttttgagacggagtcttgctatgtctcccaggctggagggcagtggcatgatctcggctcactacaacttccacctcccgggttcaagcaattctcctgcctcagcctccagagtagctgggattacaggcgcccaccaccacacccggcagatttttgtatttttggtagagacgcggtttcatcatgtttggccaggctggtctcgaactcctgacctcaggtgatccgcctgccttggcctcccaaagtgttgggattacaggcatgagccactgcgcctggccagctagagagtttttaaagcagagctgagcacacactggatgcgtttgaatgtgtttgtgtagtttgttgtgaaattgttacatttagcaggcagatccagaagcactagtgaactgtcatcttggtggggttggcttaaatttaattgactgtttagattccatttcttaattgattggccagtatgaaaagatgccagtgcaagtaaccatagtatcaaaaaagttaaaaattattcaaagctatagtttatacatcaggtactgccatttactgtaaaccacctgcaagaaagtcaggaacaactaaattcacaagaactgtcctgctaagaagtgtattaaagatttccattttgttttactaattgggaacatcttaatgtttaatatttaaactattggtatcatttttctaatgtataatttgtattactgggatcaagtatgtacagtggtgatgctagtagaagtttaagccttggaaataccactttcatattttcagatgtcatggatttaatgagtaatttatgtttttaaaattcagaatagttaatctctgatctaaaaccatcaatctatgttttttacggtaatcatgtaaatatttcagtaatataaactgtttgaaaaggctgctgcaggtaaactctatactaggatcttggccaaataatttacaattcacagaatattttatttaaggtggtgctttttttttttgtccttaaaacttgatttttcttaactttattcatgatgccaaagtaaatgaggaaaaaaactcaaaaccagttgagtatcattgcagacaaaactaccagtagtccatattgtttaatattaagttgaataaaataaattttatttcagtcagagcctaaatcacattttgattgtctgaatttttgatactatttttaaaatcatgctagtggcggctgggcgtggtagctcacgcctgtaatcccagcattttgggaggccgaagtgggtggatcacgaggtcgggagttcgagaccagcttggccaaaatggtgaaaccccatctgtactaaaaactacaaaaattagctgggcgcggtggcaggtgcctgtaatcccagctacctgggagtctgaggcaggagaattgcttgaaccctggcgacagaggatgcagtgagccaagatggtgccactgtactccagactgggcgacagagtgagactctgtctcaaaaaaaaaaaaaaaatcatgctagtgccaagagctactaaattcttaaaaccggcccattggacctgtacagataaaaaatagattcagtgcataatcaaaatatgataattttaaaatcttaagtagaaaaataaatcttgatgttttaaattcttacgaggattcaatagttaatattgatgatctcccggctgggtgcagtggctcacgcctgtaatcccagcagttctggaggctgaggtgggcgaatcacttcaggccaggagttcaagaccagtctgggcaacatggtgaaacctcgtttctactaaaaatacaaaaattagccgggcgtggttgcacacacttgtaatcccagctactcaggaggctaagaatcgcatgagcctaggaggcagaggttgcagagtgccaagggctcaccactgcattccagcctgcccaacagagtgagacactgtttctgaaaaaaaaaaatatatatatatatatatatatgtgtgtatatatatatgtatatatatatgacttcctattaaaaactttatcccagtcgggggcagtggctcacgcctgtaatcccaacactttgggaggctgaggcaggtggatcacctgaagtccggagtttgagaccagcctggccaacatggtgaaaccccatctctactaaaaatacaaaacttaagccaggtatggtggcgggcacctgtaatcccagttacttgggaggctgaggcaggagaatcgtttaaacccaggaggtggaggttgcagtgagctgagatcgtgccattgcactctagcctgggcaacaagagtaaaactccatcttaaaggtttgtttgtttttttttaatccggaaacgaagaggcgttgggccgctattttctttttctttctttctttctttctttttttttttttctgagacggagtctagctctgctgcccaggctggagtacaatgacacgatgttggctcactgcaacctccacctcctgggttcaagcgattctcctgcctcagcctcccaagtacctgggattacaggcacctgccactacacctggcgaatatttgttttttttagtagagacgggcttttaccatgttaggctggtctcaaactcctgacctcaggtgatctgcctgccttggcctcccaaagtgctgggattacaggtgcaggccaccacacccggccttgggccactgttttcaaagtgaattgtttgttgtatcgagtccttaagtatggatatatatgtgaccctaattaagaactaccagattggatcaactaatcatgtcagcaatgtaaataactttatttttcatattcaaaataaaaactttcttttatttctggcccctttataaccagcatctttttgctttaaaaaatgacctggctttgtatttttttagtcttaaacataataaaaatatttttgttctaatttgctttcatgagtgaagattattgacatcgttggtaaattctagaattttgattttgttttttaatttgaagaaaatctttgctattattattttttccaagtggtctggcattttaagaattagtgctaataacgtaacttctaaatttgtcgtaattggcatgtttaatagcatatcaaaaaacattttaagcctgtggattcatagacaaagcaatgagaaacattagtaaaatataaatggatattcctgatgcatttaggaagctctcaattgtctcttgcatagttcaaggaatgttttctgaatttttttaatgctttttttttttttgaaagaggaaaacatacatttttaaatgtgattatctaatttttacaacactgggctattaggaataactttttaaaaattactgttctgtataaatatttgaaattcaagtacagaaaatatctgaaacaaaaagcattgttgtttggccatgatacaagtgcactgtggcagtgccgcttgctcaggacccagccctgcagcccttctgtgtgtgctccctcgttaagttcatttgctgttattacacacacaggccttcctgtctggtcgttagaaaagccgggcttccaaagcactgttgaacacaggattctgttgttagtgtggatgttcaatgagttgtattttaaatatcaaagattattaaataaagataatgtttgcttttctatttccttttgaatttgtgtttattgttaattcatagctattcaaagtgtgattagagctgggcttggtggcttgcatctacagttccagctacccaggaggcagaagcaggaggattgcttgagcctaggagttcgaggctgcagtgagctatgatcctgccactgaattctagcctgggcgacaaaacaggaaaaaagtatggatggaggaccagcagcatctgtatcacctgtgagtctttcagaaatgcagagtttcaggctacactcggacctactgaatcagaacttgcactttttacaagatccccaggacactaaagtatagagtgaagcttgagaagcgctgttgtgtggattgttcttaaccagctgcagtgatgaatatgaataacgcaggccagcacagtccattgatattctattccagcttactgcctgccaaaaggtccattattactggatcctcagtcttttccaagagaagctaagaattccaaatttttatttgaaatatattttttaaatgtttgttcaactggcccagtgccagtggctcatgcctttaatcctagcactttgagaggccgaggtggaaggatcacttgaccccaggagtttgagaccagcctgggcaacataaagagaccccatctctattaaaaaaaaatagagacaatgctgccttaaaaaagtcaaataaatgtttgctcaactgatttttaatactgagggccaaacaaagcacatcaaatttttaagtgctgcttttcctcattttatccaactctggacaccagaatccaaatgtagtgattggaatccacctagactgattgaggaatatattgtcctcaaattttatgagggttgactattcattttaactttaattaggattgggcacaaattttgaaacataataacattacaggaccggggcccgatccagaccccaagagagggttcttggatcttgtgcaagaatgaattcagggcaagtccataaattgaaagctagttcattaagaaagtagaggaataaaagaatggctaccccataggtagagcagccctgagggctgctggttgccatgtccacccccgcgccccctccccccgctttgttgttgttgtttaagacagagcttcgctgtgtcatcaggctggagtgcagtggcatgatagctcactgcaacctctgcctcccgcgttcaagcaattctcctgcctcagcctcctgagtagctgggactacaggcgtgcaccaccacgcccagctaatttttgtatttttagtagagatgcggtttcaccatgttggccaggaaggtctcaatctcttgacttcgtgatccacccgccttggcctcccaaagtgctgggatgagccacctcgcctggctggttatttcttgatgatatgctaaacaaggggtggattattcatgcctgccctttttagaccatttagggtaacttcccggcattgccatggcatttgtcaactgtcatggtgccaatgggagtgtagcagtgaggaggaccagaggtcactttcatcaccattttggctttttcagccggcttctttactgcaacctgttttatcagcaaggtttttatgatctgtatcttgtgcagaccttctatctcatcctgtgacttagaatgccttaaccatctgggaatgcagcctagtaggtcttggcctcattttaccaaccccctattcaagatggagttgctctggttcaaatgcctctgatatttccctactcccttttataagaaaacccttaatcctaagggttgcagagggatgaagatccatcttctgtattcttcaggctgaataggggtgatgatattcctgcctatgagagtctcttgtattagggtagagaggagctcagtcagtcagtatggctccctatccttcctcccttccccagcccctgacaactaccattctactttgtctctatgattctaagtatctcctataagtggaatcattcagtatttgtagggtttttttgtgactagtgtatttcacttagcatgtcaaggttcatccatgttgtagcatacgtccaaattttcttctttttaaaaactgaataatattccattgtatgatatatgcacattttgcttattcatttatccatcaaagaaaaccagtagcttttttacataccggcagtaacctggttaaaaaaataagatggaaaataccaagcccgaaaatgtcaaattcttgaataccagacaggtactataatccaagctgagcagagaggaatggcccttgtctcagccctgagccacatgtcactacatgggccccaaggagctcttgtgcccagagtcctgctaaggctcgttcttcacccctctaaagtggctcaaactagcgtaggaggccaggagggagcagattctatgccacctccattgcttccgtgccttctccagatccattttttccaaaagctgtgtttgaattctgcacaggggcatctctgtctccaacactgaaaccccttttgccagacccagagaagatttaactgcctttttttttgagacagggcctcgttctgtcacctaagctggagtgcagtggcacgatcttggctcacggcaacctctgcctcctgggctcaagcaattctcctgcctcagccacccgaatagctgggattataggcgcaggccaccacatccagctaagttttgtatttttagtagagacgcagttttgccatgttgcccaggctggtctagaacttctgagctcaggtgatccacccgcctcggcctcccaaagttctgggatgacaggcatgagccacctaacctggccagatttaactgctttgagccaccgtctcacacatcttccaggagcttctagtcaaatgcagaggattaatagtgtataattccatttacataagatctttggaatagtcaaactcatagagacagaaagtagaatggtggttgccgggggatggttgaggggaaaattaggagttgtttaacgagtatggagtttcagtttgggaagatgaaaaaagttctggagatggacagttgtaatggctgcacaacaacgtgaatgtacttaatgccggtgaaccgtataaccatttaacaactgaaaatggttacaaaattttgtgttatatatatcttatcacaataaaaaatatagaggattgatcactatatttgctcccttccaaaatctcacctaggttaaagtaaagaaaaatatataaacccacaagaacacagggaccaggagaggagatgcattcattggattacgtttggttgtaaaaaaaacaaaaaatcctccccggcacggtggctcacaccttgtaatcccagcactttgggaggctgaggcaggcggatcacgaggtcacgagtttgagaccagcctgaccaacatggtgaaacctcatctctactaaaaatacaaaaattagccgggtgtggtggcgtacgcctgtaatcccagctactgaagtggctgagacaggagaattgcttgaacccgggaggcggaggttgcagtgagccgagatcacgccactgcactccagattaggtgacagaacaagactccatctcaaacaaaaacaaaaacaaaaacaaactaatataacagtgactttacatgctatgggttttttttctcctctcatcttcaagaaatgtggagactgccagtccggggatgatacagcatcacagtgtcaggaatctgctctttctgtataattgttacaggaaaggggtccggatccagaccccaagagagggttcttgaattcagggcaagtccacagtgcaaagtgaaagcaagtttactaagaaagtaaaggaataaaaaaatcgctactccatagacagagcagccctgagggctgctggttgcccatttttatggttatttcttgatgatatgctaaacaaggggtggattattcatgcctcccctttttagaccatatagggtaacttcctgatgttgccatggcatttgcaaactgtcatggtgctggtgggggcgtagcaccaaggaggaccagaggtcactcttgtggcctttgtggttttggtgggttttggccagctcctttactgcaacctgttttatcggcaaggactttatgacctgtattttgtgttgaccttgtatctcatcctgtgacttagaatgccttaaccatctgggaatgcagcccagtaggtttcagcctcattttacccagctcctattcaagatggagttgcagccgggcacggtggttcatgcctgtaatcccagcactttgggaggttgaggcgggtggatcacaaggtcaagagttcaagaccagcctggccaacatggcaaaaccccatctctactaaaaatacaaaaattagccaggcgtggttggtgtgcgcctattatgccagctacttgggaggctgatgcaggagaatcacttggatctgggaggcggaggttgcagtaagcagatatcgcgccatgcactccagcctggatgacagagcaagactccgtctcgggggaaaaaaaaaccaaaatggagttgctctggtttacaggcctctgacataatggctttatgtacatggcttccatggctagggtcagctcatagatctaatatggctgtgttggtgctcatgttgcagcccagcaatcagaaagagaaaggaggctgggtttggtggcttacacctgtcatcccagcatttcgggaggccaaggcgggaggatcacatgagcccatgagtttgagaccagcttgagcaacacagggagacctcatctctacaagaaataaaaataaattagttgggtatggtggcatgcacctgtggtcccagctattcgggaggctgaggtgagaggataccttgagcctggaggtttgaggctgcagtgagctatgatcgcaccactgcactccagcctgggcaacagagtgagaccccatctcaaataattaaaaaaaaaaaaaagaaagaaagaaaaaaaaaaggagagcagaaaaaggctatgtaccttttctttcgggttaccttctcaaagttgtgcatactacttccgtttacattacattggccagaacttaacatgacaactactagctacaaggtggtttttattctgggttgccatgcatcttagcttaagtaccctacaggtcctgagataatgattcctatgaaaatgattatttacttatttaattaatttattttgagatggagtctcactctgtcacccaggctggagatcagtggcgtgatctcggctcactgcaacctctgcctcccaggttcaagcaattctcctgcttcagtctcccgagtagctgggactacaggcatgcgccaccatgcccagcttttttgtatttttagtagagacggggtttcactatgttggccaggctgatctcgaactcctgacctcaggtgatctgcctgcctcggcctcccaaagtgctgggattacaggcgtgagccactgtgcctggctgaaaatgattttttaaaagtgttccaggaggaaatggaaagggcataggggagtaagaaagtggaaataggaaaagaaggaagccaagcaagaggagcctatcaagcaaagcctcagtcctgcagacagtctggaggcaggatattcacatcttagagttgtccaaaacagaacaggcaagctgcataattttcaactctggctgaataaggttgcatttcagctctctgggcacctggaaagtatgggctccagtaacctggaggcagtctgctgactgctggctggtgtgcacaaaagtggtaaagggatgagggagtgcaatatgggcactggcatcttggctgtcatgcatccaggtaaaaagtggaggctcaattactatatatgaaggggagaacagactttggggaacaattagcagtcatttccaggtgagacaacaacagaagagaaatgctaatttttttttttttctttgagatggagtttcgctcttgttgcccaggctggagtgcaatggcgctatatccagctcaccgcaacctccgcctcctgggttcaagtgattctcctgcctcagcctcccgagcagctgagattacaggccaccacacccagctaattttgtatttttagtagagacggggtttctccatgttggtcagggtggtctcaaactcccaacctcaggtgatccgcccgcctcagcctcccaaagtgctgggattacaggcgtgaaccaccgcacccggcgagagatgcgaacattttttttgttttttggaggatgacaagttgatgcaggaatgagcagaaccaggaggctgaatactgagtgttaaagagttcctagcaatatgcaggaaaggaaagcaacaagtatcctgagaggtgggggttagatgtagactgaaatcaggaggtgtggttaaaactctttgaaagaggctgggtgcggtggctcacataatcccagcactttgggaggccaaggcgggtgcatcatgaggtcaggagttcgagaccagcctgaccaacatgtgaaaccccgtctctactaaaaatacaaaaattagccgggcatggtggcgcatgcctgtaatcccagctactaaggaggctaaggcaggagaaccgcttgaacctgggaggcgaaggttgcagtgagccgagatcatgccattggactccagcccaggcgacagagagagatcccatctcaaaaaaaaaaaaaaaaaaaaaaaaaaagaaaggaaaagaagaaaagaaaaaagaaacagcagattccctagagaggagacattcatcactaaaaaaaaaaaaaaaaattaaaataaatcgcagaagtaaaagccctttttgaaagggctcagggtacccagcttaatgtatgaaacaaaagcaaacccacatcaaagcacaccattattaatttcagagcatcagaaataaagagaagatctgacaagcttcttggaagaaaacaaggcatagagaataatcagagtagagtagagcaggaaaacagagtcctgggtagagcgaactgagcctagccaatcgatagaattcttgatgttttgttgaaaacagaagcactttacaattctcttggtaagttttagaaagattctgtagtaatggaaaattgtacaaatttaaaaaatggaatctgttaacttcaggaagaacaaaaggtagaaaaatcaaggcaatataatcttggtacaacatttgacttagctgcaatgaataagacttacatagtcatagaaggtaaacactgattacttactttaccaaaaattatgatatcatcatattgaaagcccagaaggaagggaaataaagggaaatacaagagtgctaaatcttttatttttcaataagttggtaatgtctaaaattaataagaaaatggcaaccataagcctaatgcttagaaattcagaaaagtatcagactaaattttaaagtctactttaaactgagtctttgctttatagttgcataaataaattcattttgatggttttctcagaacagatgaactggctgggtgcggtggttcatgcctgtaatcttagcactttgggaggccaaggccgatggctcacttcaagtcaggagtttgagaccagccaaaaaattagccgggtgtggtggtgcacgtttgtaataccagctactcaggaggctgaggcaggagaatcgcttgaacctgggaggcggaggttgcagtgagccaagatggaacgactgcactccagcctgggtgacacagtgagactccgtctcaaaaaaacacaaagaacagatgaactgttttcctttgaggaatattgatgatcccactgcttgagtaatggaaaccagcttgcagctgatagttattttttgtcttttttcctgttctatccactgtcctaggtttggaatttcagctgggcagcttcgatcccaccacctgtagccactgaggttcacaggctctgtttgaggtgttgtgttagattgtgctgggttggttttgctgcttattgagtgatgaagagcaacatattagctactgagatattttgcagaaaaaggaagagatgtcttcagctcaaatgctatcaaacttgtatgtcttttaactttttattataaaaaatttcaaacatatgcaaaagcaaaagactagtttaatgaaccttatgtacccaccacccagtttcaacaattatcagttcctgacaattcttgtttcacctatcccacctctattatacacacatacaaacacacagacaccacacacacacacacacacacacacacgagagcaaagtcaacttccattattttgaagcacatccaagacatcacatcacattatttatcacattatttattaagtttcttcagtcacagtccatctcacagaaagaaatcccccatgagaaacttttaggacatagcttttatgttaattacttaatttctgcactagccatccttgcctgccttctaattttctgcactagctatccttaccttccttctaattttctaacctgccaaggattctgctgcctcaaggtatttgtttctttctgcctggattgctctttcgcagatacttacatgtctcattctttttcacccaggtgaaataaacagcgttgttgctcacacaaagcctgtttggtagtctcttcacatggacgcgtgtgacatttggtgctgaagacccgggacaggaggactccttcaggagacgggtcccctgtccttgccctcactccgtgaggagatccacctacgacctcgggtcctcagaccaaccagcccaaggaacatctcatgaatttcaaatcgggtaagcggtcttttccatcctctcttgctacccttcaatctccctctctcgctacccttcaatctccctgtccttccaattccagttctttttcctctctagtagagacaaaggagacacattttatccgtggacccaaaattccggcgctggtcacggactcaagaagacagtcttctcttggtgtttaatcactgcagggacgactgcctgattattcacccacactccattggtgtctgatcaccgtgggggtgcctgtcttggtcattcacccacattcccttggtggcaagtcaattgcggggacgcctgctttggctgctcacccacccccttctccgtgtctctacctttctctttaaacttacttccttcactatgggcaacattccgtcctccattcccccttctactcccttagcctgtgttctcaagaacttaaaacctcttcaactcacacctgacctaaaacctaaaagccttattttcttctgcaataccgcttggccccaatacaaactcaacagtagttccaagtggccagagaatagcactttggatttgtctgtcctacaggatctagataatttttgttgaaaaatgggcaaatggtctgaggtgcctcagatccaggcattcttttacacactggtccctccctagtctctgctcccagtgcgactcatcccaaatctttcttctttctctcctgtctgttccttcagtctccaccccaagctccgagtcctttgaatcctccttttctatggactcatctgacctctcccctcttccccaggctgctcctcaccaggctgagccaggtcccaattcttcctcagcctccggtcccccaccctataatccttttatcaccccctcctcacaccgtgtctggcttacagtttctttctgtgactagccctcccctacctgcccaacaatttcttcttaaagaggtggctggagctgaaggcatagccaagggtaatgctcctttttctttatctgacctctcccaaatcagttagcgtttaggctctttttcatcaaatataaaaactcaacccagttcatggcctgtttggcaacaacccttggacactttaccgccctagacccagaatggccagaaggccgtcttattctcaacatgcattttattacccaacccactcccgacattagaaaaagctccaaaaattagattccggccctcaaaccccacaacaggacttaattaacatcaccttcaaggtgtacaataatagagtagaggcagccaagtagtaacgtatttctgagttgcaattccttgcctccactgtgagacaaaccccagccacatctccagcacacaagaccttccaaatgcctgaactgcagcggccaggcattcctccaggactgcctaccccaggatcttgcttcaagtgccggaaatctggccactgggccaaggaatgcccccagcccaggattcctcctaagccatgtcccatctgtgcaggaccccactggaaatcggactgtccaacccggcagccactcccagggcccctagaactctggccaaaggctctctgactgactccttcccagatcttctcagcttagcagctgaagactgatgctgcctgatcgccttggaagccccctggaccattacggatgctgagctttggataactcttacagtagagggtaggtccatcccctgtttaatcgatatgggagctacccactccacattaccttcttttcaagggcctgtttcctttgcccctataactgttgtgggtattgatggccaggattctaaaccccttaaaactcccccactctggcaccaacttggacaacattcttttatgtactcttttttagttatccccacctgcccagttcccttattaggccaagacattttaaccaaattatctgcttccctgattattcctggactacagccacatctcattgccacccttcttcccaacccaaagcctccttcgcctcttcctctcgtatcccccaaccttaacccacaagtatgggacacctccactccctccctggcaaccgatcaaacacccattactatcccattaaaacctaatcacccttacctggctcaatgccactattccatcccacaactggctttaagaggactgaagcctgttatcactcgcctgctacagcatgggcttctaaaacctataaactcttcttacaattctcccattttacctgttcaaaaaccggacaagtcttacaggttacctcaggatctggatcttatcaaccaaattgttttgcctatccaccctgtggtgcccaacccatacacttgtttgtcctcaataccttcctccacaactcactattccgttcttgatctcacagatgcttttttcactattccctacaccactcatcccagcctcttttgcttttacctggactgaccctgacacccatcagtcccagcagcttacctgggctgtactgccgcaaggcttcagggacagccctcattacttcagccaagctctttctcatgatatactttctttccatcccttcgcttctcaccttattcaatatattgatgaccttctactttgtagcccctcctttgaatcttctcaacaagatacttttcaacatttattctccaagggatatcggatgtccccctccaaagctcaaatttcttctccatccgttacctacctcagtataattcttcataaaaacacatgtgctctccctgctgatcatgtctgactgatctctcaaaccccaacaccttctacaaaacaacaactcctttccttcctgggcatggttggatacctttgcctttggatacctggttttgccatcctaacaaaaccattatataaactcacaaaagcaaacctagctgacctcataaatcctaaatcctttccccactcccctttccattccttaaaaaacagccctaaaagctgctcccacactagctctccctaactcatcccaacccttttttcattacacacagctgaaatgcagggctgtgcagttggaattcttacacaagagccaggaccatgccctgtagcctttctgtccaaacaacttgaccttactgttttaggctagcccccacattattcctgataccacacctgacccccatgactgtatctctctaatccacctggcattcactccatttccccatacttccttctttcctattcctcaccctgatcacacttggtttattgatggcagttccacctggcctaatcgccattcaccagcaaaggtgggctatgctatagtagtatcttccacatctatccttgaagctaccgctctgcccccctccactacctctcagcaagctgaactcattgccttaactcgagccctcgctcttgcaaaaggactacatgtcaatatttatactgactctaaatatgccttccatatcctgcaccacaatgctgttatatgggcagaaagaggtttcctcagtacgcaaaggtcctccatcattattgcctccttaataaaaactcttctcaaggccgctttacttccaaaggaagctggagtcattcactgcaagggccatcaaaaggcatcagatcccatcgctcagggcaatgcttatgctgataaggtagctaaagaagctgctagctttctaacttctgtccctcacggccagtttttcttcttctcatcagtcactcccacctattcaccgactgaaacttccacctatcaatctcttctcacacaaggcaaatggttcttagaccaaggaaaatatctccttccagcctcacaggcccattctattctgttgtcatttcataacctcttccatgtaggttacaagccactagcccacctcttagaacctctcatttcctttccatcatggaaatctatcctcaaggaaatcacttctcagtgttccatctgctattctactacccctcagggattattcaggccccctccctaccctatacatcaagttcagggatttgcccccacccaggactagcaaattgactctattcacatgccctgagttaggaaactaaaatacctcttggtctgggaagacactttcactggatgggtagaggcctttcccacagggtctgagaaggccaccacagtcatttcttcccttctgtcagaaataatttctcggtttggccttcccacctttatacagtccgataacggactggcctttactagtcaaatcacccaagcagtttctcaggctcttggtattcagtggaaccttcataccccttaccgtcctcaatcttcaggaaaggtagaacggactaatggtcttttaaagacatctcaccaagctcagcctccaacttaaaaaggactggacagtatttttacctcttgcccttcacagaattagagcccgtcctcgagaagctacagggtacagtccatttgaacttttatatggacgcactttcttgctcagccccaacctcgttccagacaccagccctctaggcgactatcttccagtcctctggcaggctagacaggaaatccaccaggctgctaatcttctcttgtctactccagattcccaactatatgaagacaccctagctggacgatcagttcttattaagaacctgacccctcaaactctacaacctcgatggactggaccctacttagtcatctatagtaccccaactgccgtccgcctgcaggatcctccccactgggttcaccgttccagaataaagctgtgcccatcggacaaccagcctaatctctcttcttcctcctggaagtcacaagtactccccactacttcccttaaagtcactctcatttctgaagaacagtaataacccttatgagcctaatacatcccttcattctattagctctattcatccttaccctactttttgcaacagggctttacacagtcaccccccctacttggactgaaccccaaaaacttgtcatccctactatcttctgtttactcatactcccattcactattctcaactactcataaatgccctaa

SEQ ID NO: 2 - DNA, 62956 bp, mfascicularis
agaatgtaatgatggctttttcttactaaattttcagtggaggaggaggagaaagaaagtaaatagttatatgaacacagtagaaagtacaaagtggaaaacaaaaagagtatcgaacccaggtgagtggtccaaacctccccccagaaacctaagaacccatagaaatgggtgggaagcggagaagatcctccagacagcaggtggcgatgtagcatcccccagaaggccctctaacagaaactaggaggacgcgctaccaaggtcacgtgtccccggcgttcactcgctcttcgcttcacgtgactcgcatcctcgcgggtgattggcctgcgtgcggcacgtgggcggggggaccagggcggggcggggtgggcggaggggagggacagggggcggagctggagggggtggttcggtgtgggggccgttggctccagacaaataaacatggagtccatcttccacgagaaagtgagtgtccgcgtgcggtggggagctgtctgccgcgcggtggcgggcgtggagcgcggcatcacagcctcccggagggctgggtggggtccgagtcgcccccatgccgatctcgccgggctaggggcgacgccgcaaccccccgcctcttcggctcggggaggggagcatcacctacgctcctacttcccccgcggcccccgccctgggagccgggagggagtatgggcggggccgggggcgtctcgggacacgggagcgcggtggcgcccagtggatttgcttcttcctttctaagtcactttccatagcttttcggaggattccttcacccctccccaatctttccctctccctagggtctagctacagtcacctctgggacacctccctcgacccctcctaccctactcctggcagaattaacttttctttctccagactgctcaattctatattggagtcttccctacatttagatctttgaggtcttgttcatgttttttcccctgcaccaggtccgcgagcctcccgagggaggagaccttggctcgcccactgtagggcctgacacttaggaagtgaagtaggaaacccgttgtgcccctaaacagggaagtcgtcacgagtttttattacgggatgtttgggtttggtttcttttggtactctcatctttccggagcaggcagccagctttgtttttaggtattaggagtggactggaatgattttgttgtggtctgcctagcctgctgtcactttaactcttcagtgaccatgcacttgaagatactgtttgtgacatgtggagaaactcctcgtttctcacatgctattatccatccatttgtatgtgagtgaagccttccccaggacaactttggcacatgatatcttgtttcataatagtatcatgtttggaaagagttgctggtaaggctattatttaataggaggagcaaagggtttttgttttattaaatgcttataaatgatcgtttatcccagacatttaaaattcacacacacagccgggcgcggtggctcacgcctgtaatcccagcactttgggaggccgaggcgggcggatcacaaggtcaggagatcgagaccatggtgaaaccccgtctctactaaaaaaaatacaaaaaatgagccgggcgcggtggcgggcgcctgtagttccagctactcgggaggctgaggcaggagaatggcgtgaacccgggaggcggagcttgcagtgagccaggatagcgccactgcactccagcttgggcgacagagcgagactccgtctcaaaaaaaataaaataaaataaaataaaataaaattcacacacacacaacaaataaagcaaagacaaaagaatacatttaccagatgtaaatctgtagtataaatcttttttttaatttttattttaaagatggcatctcattctgtcacccaggcaggtgtgcagtggagagatcatggctcactgcagccttgactccctaggcacaagcgatcctccctcctccgcctccagagtagctgggactacaggtgtatatcgccagggccagctaatgtttttggagagacaggggtctcgctgtgttgcccaggctggtctagaactcctggactcaggtgattctcccacctcagcctctcgaagtgctgtgattacaggcgtgagccactgtgcctggaacaaattgttaagtacaatgcttttcattgtagaaaacatctcggaaacttttgaaataggcagatttacagtgggggaggaaggcctcagtcgtatagttgtcactgattttttgacttgattgacatgatttataaatcatagacaatagagatttagttgcttggctgagtaaagtgtgtgaaaaatacacatgtactttcttaaaaacattttttttttgagatcgagttttgctcttgtcacccaggctagagtgcaatggcgcgatcctggctcactgcaacctctgcctccctgttcaagctattctcctgcctcagtctccctagtagctgagattacaggtgcccaccaccacgcccagctaatttttgtatttttagtagagacagggtttcaccctgttggccaggctggtctccaactcctgacctcaggcgatccactcgcctcggcctcccaaagtgccgggattacaggcgtgagccactgcacccggccatatttttgttattaattttcaaaggctttggtgtgggaccagatttcaacatggaaggccttaaacatgttccacactacttcctgagaatcagacaagatttttaacaatattgattgttacctagttgggacgcatttctactgaaccatgggatcaataaaagctgggtgctagccttgcgaaaatctacttacccgaaagaagtccctcttagtccgggtgcggtggctcacaccagcgctttgggaggcccaggtgggtggatcacaaggtcaggagtttgagaccagcctggccaacatggtgaaaccacgtctctactaaaaatacaaaaaattagccaggtgtggtggcaggtgcctgtaatcccaggtactcaggaggctgaggcaggagaatagcttgaacccaagaggcagaggttgcagtgagctgagactgcaccacttcactccagcctgggcaacaaagcgagactctgtctaaaaaaagaaaagaaaagaaaaaaaaaagagtccctctgaattatcagcatgtgtataggcctacagatacttcaggaatgtatttaccattatcattaacttgtatgtacatagcaagtgaagattcaacaatttagttttttgggcatactcaagagtatgcacctataaccatatggcccattgttaatctcctatacagtccattctaggaatgtttgggcttactgtgccatttttcagttcaccgccttcccctctgcaatatacctttaacccttgctaggtgctgggtttggagagccagagaaccaactttggccctagagaagctgggtaggtgggaatatctgcctacaaagggccttgcaaccacttcctcttggaaccttggtttcctctttctgagttgtcactttgagtaccctttattaagttagaatgtaaaaacagtttcgcactgatacatctacagtgcctgagatagggcctggcacagagtaagtactcaataaatatttgaatggggctgagcgtagtgagacctgtctctacaaagaatgaacaaaattagcccgggtgtgttagcacacgcctgtagtcatagctacttgggaggctgaggtgggaggattgcatgagtctgggaggtcgaggctgtagtgagccaaggtcacaccactgcactccagcctgggggacagagcaagatcctgtcccaaaagaaaaaaatgtatatatttgaatggataaagagaggtctttgagtttctgagatatatatggtgctgtttatctaaagtaaacaacttttctgtaaacattttaaggctttgcaggccagctgtagtctctgtcacacattcttatgtgtgcatgtttttcccaaccatctaaaattgtaaagtgcattcttagctaccagggcaggttaaatttggcccatgggctagagtttgccaacccctaacttaaacttttgtactaactttatgaccactaactactggatttttgttgtttgttttagttctggtgcctgctttctgtcttttttttttttaaatcacttctctttctgatgtttcttggtgcagtcactgtgccatttgtattggtgattttaatgtaatgcaaactgggaataataactaaacttgctgggattgtacataaagttattgaaaagatgctgagtattgactctgtggcattcattatgcccttttgtggttgctggattttagctgtctttaggatatttgagctttaggagaagccaaattctgtataaatgacttgaagtgctaatggcacagattttgaaacctctgcctgggtttgagtctcagctctgccttttactacttgtgtgatcctgagcaagttacttaggatccctgtcctctggtttcctcctgtgtagtggtggggataataacatagacataacctcagagttagagtgtagagaaggctccctggcagatagtgctgtagaagtactggccattgccattactcagatgcttgtgtttgctgatcctcatagtaaggcctcggagagcactaagaggaggtgagaatgctgctagattgacagcttgtccccagatagcccattcctgagagcatcttagctttatacctgatttgtgttgtagttagtagtgtctgtggtaattttaactagtttcaggttggtcttgaaaacctggaaaggttgggggtaaatgatttggtagcagttcccttgtgattttataaattatctttgtagaactgcagtgtgctaattctctgagcccaacacaatgaagtctgggcctaaaatcataggatttcttttattttttaaaatttttaattcatttcatgtcttttcttttcttctttttttttttttttttttgaggcggagtcttgctctgtcaccaggctggagtgcagtggcgtgaagtcagctcactgcaacctccgtctcctgggtttaagcgattctcctctcagcctcccgagtagctgggtctataggtgtgtgccaccatacccagctgatttttgtatttttagtagagacaaggtttctccatgttggccaggattgtctcgatctcttgacctcgtgatccacctgccttagcctcccaaagtgctgggattataagcgtgagctaccatgcccggcctattttttatttttttgaggcggagtgtcgctctgtcacccaggctggagtgcagtggtgcaatctcagctcactgcagcctctgcctcctgggttcaggtgattctcctaccttagcctcccgagtacctgggactacaggcgcctgccatcacacatggctaatttttgtatttttagaagagacagggtttcaccatgttggccaggcgggtctagaactcctgatctcaagtgacctacctgcctcggcctcccgaagtgctgggattacgggcatgagccaccattcccagccaaatcatgagatttcaatactgctgaactttgattatggcaaagtgaactactgctttgattaaagcttgatgagagaggtggctggggatagtttgagataagggcaaggcaggaaaatgcataatcttaggtgggctcattgtcattgtacaattcttttggtctgtgtggcatttgatctgtcctatgacttaagttacgtttatttttatttttatttttatttattttatttctttttgagagacatggtgttgctctgtcacccaggccagaatacagtggcacaatcatagctccatgtagccttgaactcctgggctcaagtgatcctcccactcagcctctcaaacagttgagattacggtatgaaccactgtgcctagccttaagtcatttttaaatttgtactgaacagtttgtcctttccttccattaaatcatattagaagtacagaacttgatatttcctgtagcaatacagtgtatctttgatgaagtttgatttcaaatacttatttttcataatttaaagctattttttatagagataattttaatcaaatatttggatgtcgctattgctatatgtgatattaagtatggtgaccatagtttgtaaactccaaactgacagcaggacaggaaatttgtgttagcaaaggcttttttcttactgtttgaattttttaaaaattaggtaccatacagagaggagcacacaaatcgttaagagtacggctcagtgaattctcacaaaatgaacatgtgtaaacagcaagtaacagaagatttacctgcatcctataacctcccattattcccttttctaggtactctctctccactgcactcccaacaaaaataacccctatgctgaattctgatatcataaatgagttttgcctagttttgagcttttgtgactggaatcgtacagtgtgtatacccttttgactctgtcctctttagtttaccattgtttgagagatttatccatactgttccaggtcgttgtagttaattcattcacattgttatgtagtattcctttgtgagtaaacacaatttccattctgctgtgatcccagctatccatttgggtcgtttccagtttagggaccattacaaatagtaatgctatctgtaatgctattttgtgttactacaaatagtaatgctatttgtagcacaaaaatagtgcttttgtgaacattctttttttttttttttttgagacggagtctcgctctgtcacccaggctggagtgcagtggccggatttcagctcactgcaagctccgcctcccgggttcaccccattctcctgcctcagcctccggagtagctgggactacaggcgcccgccacctcgcccggctagttttttgtattttttagtagagacggggtttcaccgtgttagccaggatggtctcgatctcctgacctcgtgatctgcccatctcggcctcccaaaatgctgggattacaggcttgagccaccgcgcccggccctacattcttatacatatcttttgatgaatatatgtttgcatttctgttgtttacattatgtacctactaatggaattgctagatcataggagatgtacatgttaagctttagtagatgcattacataattattagttattattggttataccaatttactctctcaccagtagtatacaacagtttctatatctctgatctccaatattttagccattttagagtttgtgtaataacacattgtggttttaatttacatttccctgatgactaatgaagttgagtaccttttttgtgttctttatagctatttgactgtcttgtgaagtgcttgtttgtcttgccttttcttttctttctcccctcccctcccctcccctctttttgagacaggttcttgccctgtcatccaggctggagtgcagtggtgcaatatcagcttactatagcctcaacctttttggggctcaggttatcctcctatctcagcctcccaagaagctggactacaagcacacaccaccatgctcagttaattttttaatttttgtagaaatggggtttcaccatgttgcccaggctggtctcaaacttctggactcaagtaatcctcctgccttggcctcccaaaatgctgggattacaggcatgagccaccgcagccagccttggctgtttttcaataggttataagtagaacatctgtatatcccttcaatttgcatatcattcagtaagagttgcactctggtagtagaaatatagaagaaagagaaagaagtggaaacaaaaagtctattttcatgagaagacttgggggctagtgttctctctggctccaagctacttattccttaccaaaagatgaggataaacttatctcagactcaggctgtctcaatgctgtcttcctattccattatacacatataacccatatttttttcaccagctgaattttgttcctagaaaattgatttatcaggaaaaaattccgtcttgcaaggtggttctctttagagtctactgtgtaacatagctcaggacaaattgtgtgatgtcagataagttgggttaaggaatagaccttattggggaaagagagaacttggagggccaaggttagcaggagaaggaaatgttctctcatctgctatcatttcaggaaggggcaaacctggtgtctgtgttcacagggagggatccatctatacgtgattctcccttcttaccaggtagcatgggaaagctactgctgtggggaggaggattacacacaggttactcggtaccaggcaccctggacttggattcaggctgccagttgtgtgagaaactgcccagcacttgaaggttctgaacccgtgggaggttgtacctacctcccataaggaggaagcctgtcgtcccgtgggagctgagcttgggtgcagtccctcttgctggcttgtccaggagtgagctccagggttgtttgggacagttctgctcattgcattacgctgcgtgtacattatctgtagagttccatgaagagaacttcagctctgtaactgcaagttttaacatggaacagaatttttctcacctgtattgattcttaagatttgaaattctgtcaacaagcatttaaattgtgtggagtgttttttttttttttttttttttttttttttttgagacagaaggctggagtggcagtggcatagtcttggctcactgcagtctgtacttcccaggttcaagcgatgctcatgccttggagtcccgattagctaggtgtacgggtgcacaccatcacactggctaatttttgtatttttagtagagacggggtttcgccatattggtcaggctcatctcgaactcctggcctcaagcaatccacccgccttgacctcccaaactgctgggattacaggtgtgagccaccatgcttgaccggcattatgttaaaagaataaatgttctaggcagctaggcacagtggcatgtttctgtagtcctagctgctcgggaggctgaggtaagaagatcccttgggccctggagttcaagtccagcctgggcaacatagtcagatctcattttttaaataaataaataactgttctagagactaaaatttcctttcaccattagtaatttactgtggaatctccaagaatgaacttattttaggtagtgaaaatgagggagactaaatgttttatacagtggtttttagtaaagtatgagatttgatgcatttgatagatgataatgtttttttgttttttgttttttgttttttttttgagacagagtcttgctctgttgcccaggctggagtgcagtggtgtgatcttggctcactgcaggctccgcctcctgggttcatgctattctcctgcctcagcctcccgagtagctgggactacaggtgcccgccaccacgcccggctaattttttgtattttttagtagagatggggtttcaccgtgttagccacgatggtcttgatctcctgacctcgtgatctgcctacctcggcctcccagagtgctgggattacaggtgtgggccactgcacccgaccgataatgtttgtttaaaataattcttaaatttttgatcatgtaatgtagtttcattaatagtagatttgtaaaataaatgttaacaaatgaaaatgcatgtacctatgttaattatacttatctaaagctgaaagttcagttcaactatgttaaaaaatagttggagccgggcacggtgactcacacctgtaatccgagcacttggagaggcctaggcgggtggatcacaaggtcaggagatcgagagcatcctggctaacacggtgaaaccccatcactactaaaaatacaaaaaattagccgtacgtggtggcggcgcctgtagtcccagctactcgggacgctgaggcagtagaatggcgtgaacccgggaggcagagcttgcagtaagctgagattgtgccactgcactccagcctgggtgacagagcaagactccgtctcaaaaaaaaaaaaaaaaaaaaagagttgcccaggcgcggtggctcacacctgtaatcccagcactttgggagactgaggcaggcggatcacaagatcaggagttcgagaccatcctggctaacatagtgaaaccctgtatctactaaaaatacaaaaattagccgggcatggtggtgcatgcctgtagtcccagctactcgggaggctgaggcaggagaattgcttgaacccaggaggcagaggttgtggtgagccgagagtgctccactgtactccagcctggacaacagagcaagactgtgtctcaaaaaagaaagaaaagttaatgattaaattatttaggggaaaatactgtgcaattctgtttaataagtcacattttaattttttcttttggaaatattagcaagaaggctcactttgtgctcaacattgcctgaataatttattgcaaggagaatattttagccctgtggaattatcctcaattgcacatcagctggatgaggaggagaggatgagaatggcagaaggaggagttactagtgaagattatcgcacgtttttacaggtactgatgttaaactcactaagtcacattttctttttttttttttttgagacggagtcttgccctgttgtccaggctggagtgcaatggcgcaatctcagctcactgcaacctctgcctcctgggttcaagcaattctcctgcctcagcctcccaagtagctgggattacaggcacacgccactatgcctggctaattttttgtatctttgttagagacggggtttcaccatgttggtcaggttggtctggaactcctgatctcatgatccacctgcctcagcctcccaaagtgctgggattataggtgtgagccaccacacccggcttacatttcttttaaaaacgtagatactatttagaaaaggatgtgccattcttcctatagggatctgactggtgaattataactgcactgttaactttggaaatggaaatgcaaagatgttattttaaatatgcacgctaatgacagtttgtatccttctttccccacccccacgcgtgcttcaactacctgtcaaaattaacagcagccttctggaaatatggatgacagtggttttttctctattcaggtaagtagtcacaagcatctactatgtgttgcttacatcccaggccccgtttcacagcctttcaatagtcactataacaaggcgaccttcagaagttcttctaatagatcatgtctacagagtataagattatactctagatcactagattgtgatccacctgcctcagccttccaaagtgctaggattacaggcatgagccaccatgcccggccaactagagtactagatttttatatagataaacatgaaaggattgtagaatcttcatattagagtggggcatttaaaaattcctttttgagaaagattatttaatttgcatctggatgctaataataaccttaattctggccaggcgtggtggctcacacctgtaatcccagcactttgggagggcgaggtgggcggacctcagggtcaggagatcaagaccatcctggccaacatggtgaaaccctgtctctactaaaaatacaaaaattagctgggcgtggtgatgcaagcctgtaatcccagctactctggagactgaggcaggagaatcgcttgaaccagggagtcagaggttgcagtgagccaagatcgcaccactgcactccagcctggtgacagagcaagactctgtctcaaagaaaaccaaatacccttaattataataagtcccaatgtctcaaacttaccatttgttgggtaaacttaagaaaatgcagtaccttgctaccatccttttaaatcagcctaccagactggatttccttattatggtctgtggcttttgatttttctctttgagttctttggtggttatatatatgtacttgaaagattcttttatctgcgtgtctttcattcttttctgacactgtgagttgtatccagaggtctttcagaacctctcctgagcgacctatctctgcagatacctttgtttgtatttctcttgtactgccctcctggactcctcctcatccaccagcatttccatctagtgctttaccgtgccactgttaacaggtaattgctactgcagggctggaatcagaggtcagagtaggcccagcacttggcgtttcctatttgtgccttgctgctcttggtacccactgccttgcactcactttctgtctttgccggtacctggttgacttgcttctttgttggctaccttggagggtagatagtgaattttcagaaatttcccattttttgtcagacagattgaaataatcaggtttgcattttgtttttttctacaagtggcaagcccatgaccctggaagtctgatacctatggaaacttcagtttaagtgcccagggagaacttattttggtagacacgatttctgacattgcaagtagtaagttgaatatacattttctaaagtagcacccacggcagccaaattaccagatgtatatagtagactagttttaagaatagcacttatgggtagaatatacatacatctggatttttgagacagttttatgtaggaattgtgtggttttctggaacatctcagagacctggtatgaaaagcactcttctaatatatatgtgtatgttttttatggatttagtgatatatctatacacacacacacttttgaaaacctatagccggctgggcgtggtgactcatgcctgtaatcccagtactttgggaggccgaggcgggcacatcacaaggtcaggagtttgagaccagcctggccaacaaggtgaaaccctgtctctactaaaaatacaaaaattagctgggtgtggtggcgcatgcttgtaatcccagctactcgggagcctgaggtaggagaatcacttgaactcaggaggcagaggttgcagtgagccgagatcatgccactgtacttcagcctaggcaacagagcaagactctttgtcttaaaaaaaaaaaaaaaacaaaaaaaaacctgtagccttctagagaaatttatatatgaggtacacaactaacatagctatacttcttaaagtgtttacacaactgacatagctatacttcttcaatttggaatggagtggtttggcttatgaaaagttactatttttcttaacaggttataagcaatgccttgaaagtttggggtttagaactaatcctgttcaacagtccagagtatcagaggctcaggatcgatcctatgtaagattttgttttgcatttcatacatttcttttcccaaatttgatttttaaagatatttcttaaagaagagaaatataattggaatacttgtgttttgatgttccctgtttcattccctcagactttcctatttcacctttgtgatgtccatgagcatctgccctgtagccttcctggcaccccagtgtctgtggcagcacagagctgccccgtaagtggtgcgtgaggccatcttttggcccggcatcactaagctgctgcagagacgttcatatggttgtgtgatcttttaaaaacatcagtgacacttaactgtaaatctaatcttaaattatcacaaattttatataatgtttgccagtagacaacataagtatgaattcaatatttcaagttaatattgtgtgttttcttttttagaaatgaaagatcatttatatgcaattataaggaacactggtttacagttagaaaattaggaaaacaggtaacatttcttacccttccttgtctttttttcttatattgtgccccatttaaaactaaaatgtgggccagatgtggtggctcatgcctgtaatcccaacagtttgagaggcttaggttgggggatcacttgaagccagaactttgaaactagcctgggcaacaaagggaggtcctgtctcttattaaaaaaaaaaaaaaaaaaaaaaaaaaaagccaggtatggtggctcacatctgtaattccagctttcttggaaggctgaggcaggaggatcacttgagctcaggagtgtgaggctgcagtgaactatgattgtgccactgtaccccagcctgggtgacagagtaagactctgttttataaaacataaaaagaaaaagaaattttaaaattaaaaagaaaaaacaaaaggattgctgactttaaaattaggaaactgactagtaatgtgtgtgtttgtggcatggttatctatcttgatagatagaaatttgtcattttaaaacatatcagttttccttgtaaatttatttgtgacaagtatatgcaatttaactatatcataagaaaaattctatattaaatataatacaaatgtggttactttgaagtgggtttttatgtgatgactatgttctgtcagttaattactacatttgtagatttgtatttagcatagtgctgtcacaaagcctgaaatagtgtcaagcatgaataaagcattcaattatgcttgctttagtgtaagattattcatatgattccaaaagccatgtaatacatacgtctacataaaatcacttctatttgttaaataaaacatgaaatatgtcttgagcaagctattttaagaaacagaatcatttaacatcctttttattagaattttgaatctttgaaagagggttcttgaaaaccagctagcacagtaaaaaagaataaactagtgatacatgcagcaacatggatgaatctcaaaataattatgctgaaagaataaccccgaaacagaatactacatgctgtatggtatcatttattaaaagtctagaaaagtgcagattcatctgtagtgatgaaaagcagatccaccagtggttgcctggggatgaaaaggctaaggaagagtgagaggggggagggtcagagagaggcatgggaaacgtggcagtgattaatgtgtcacagtgttggttgtagtaatggtttcatgggagtacagtatacaaatgtcaaaacatttcaaaggccaggtgcagtggctcatgtctgtaatcccggcacttttggatgccacggcaggaggatcacttgagctcaaggagttcaggaccagcctgggcaatgtcacaagaccccatctctacaaaaaaatgaaaaaaaaaaaaaagaaaaattggctaggtgtggtgatacatgcatgtagtcctaggtgctagggaggatgaggagggagcccagaggtcaagcctgcagtgagtcatgatcgcactactacactccagcttgggtgacagaaggagatcctctctcaaaaaaaaaaaaagtttcaaattgtacactttaaatatgtgaagtttattatatatcacttataccccaataaagctgtttgtttttttaaaaaagtaaataaaagccaaaaaagatatgtcaagaaagtatattgaattaaatctataagagataattcaaaaacaaaaaccctattgttatcttttaagtcacccaaatcaaatttgggaaaagtcacctacttagcttcatcctaagttggttcgttctttctttctttctctctttctctctttctgatggattcttgctctgtcacccaggctggagtgcagtggtgggatctcggctcattgcaacctccgccacccaggttcaagcaattttcctgtctcagcctcccgagtagctgggactacaggtgtgcaccaccacacccagctaatttttgtatttttagcagagacggggtttctccatgttggtcaggctggtcttgaactcctgacctcaggtgatcctgtccatctctgcctctcaaatacagggaatacaggcgtgagccaccatgcccagccctaagttggttctttcttaaagttcttcctgaggagccaagagcaagttaaggaggtgtaatctagaagcttacagtggaggctagctgggtgcagtggttcacgcttgtaatcccagcactttgggaggctgaagcagggagatcactgaggccaggagcttgagaccggcttggaccaacacagtgaaaccttgtctctaccgaaaaaaaatttaaaaagtgcaacttagagcagtagaggctgacacgagtgggaatcacctctaggtaaaaaccagggtagggtactgctgagattatttaacctctgggttttatttacgtgtttttaaaaattatgatccagtattctttactttttttgtataaagtaagcactgaatttttaaggtctgtagacttagatttcagaagtaccctcgtattaatttgcaaataaatgtctatcttattattttgagagatttaaaaatttttagttcttcaaaattgaattttcacattttgaattacattatctttgacaaatacagatgatgttggccgggcgctgtggctcatgcctataatcccagcactttgggaggctgaggtgggtggatcacctgaggtcaggagttcaagatcagctttgccaacgtggtgaaaccccgtctctactaaaaatacaaaattagctgggtgtgttcgcgcatgcctgtaatcacagctacttggaaggctgaggcaggagaattgcttgaacctgggaggtggaggttttagtgagccaagatcacgccattacactccagcctgagcaataagagtgaaactctatctttaaaaaaaaaaaaaacaaaaaaaaaacaaatacagaagatgtcaaattttggtttattttattttctttggttctaatttatatttttgtttaaaactatatttttcactatagactctgtctgaggtccctgtataataaaaaagaaggctggaaaaagtattaacattgtcaaaatccaggaaaatagttggtcatgatactgacagtaactttaaacactttttgtatcttgtgggttaaattaggattactttgtggtagtgataaatgatgttaattagggccgagtgcagtggttaacacctgtaattccagcatgtagggagactgaggtgggaggatgtcttgaggccaggagtttgagaccagcctgtacaacacagagacccccatttctacaaaaaaaattagaaaattcgtcaagcatcttggtgcacacctgtagtcccagctatttgggaggatgaagcgagagaatcacttaagccaggggttcaaggctgcagtgagttatgattgcaccactgcactccagcctagatgaccatctctttaaaaaaaaatgtgtttatatgttatatgtgatagtgttttttaaaaacatttttaaattatagagggtctcactatgttgcccaggctggtctcaaattcctgggctcaagcaatcctcccacgttagcttcccaaagtgcttggattataggcatgagctgccatgcccacctaatttagtgatttttaaaaactgagttggtaattataaattatcttcctggaacttctgactttctcacaattggaatcttttgacaaaaattatcggtaatgggaaaactttgtatagttgtcatttttcctcccatcagtatgatagatgcgattagagttatgttggactgatactttgaaaaaagatttaactatagctattaataaagacatttcaactacggactatccatttttattcttttgggagggtttaatgtttatagtttaaagcaaagtgttgtttttaaaaaactatttaacagggccgggcgccatggctcacgcctgtaatcccagcactctgggaggccaaggcgggtggatcacaaggtcaggagatcaagaccatcctggctaacactgtgaaaccccatctctactaaaaatacaaaaaattagccgggtgtggcggtgtgcgcatatcgtcctagctactcgggaggctgaggcaggaggatggcatgagcctgggaggcggagcttgcagtgagccgagattgcaccactgtactccagcctgggcaacagagcgagactctgtctcaaaaaaaaaaaaaaaaagagtatctaacagaggccgggtgcagtggctcatgtttgtaatcccagaactttgggaggccaaggcgggaggatcatttgaggtcaggagtttgagaccagcctggtcaatgtggcaaatgtgctgtctctaactaaaaatacaaaaattagctgggtgtggtggcgcgggcctatagttccagcttcttgggaggctgaagcaggagaattgcttgaacctgagagacggaggttgcaatgatctgaggtcatgccactgcactccagcctgggtgatagaatgagactcttctcaaaaaaaaaaaaaaaaaaagtaatagtgataaatctgcagtattctcttttaagatattattcagtcagaggaaagagctcaacttgaaatatttccagagtttaaacaatcttactaaactttgatgggttatatctgttcttaacatgtgaaactactttattacctataatatgcactaacttaaatattgacaattttttttccagtggtttaacttgaattctctcttgacgggtccagagttaatatcagatacatatcttgcacttttcttggctcaattacaacaggaaggtaagtaaaggctgaaaattttgtaacgttatctttcgaagtagttaaataaactggagcattagatgacagtgtgacaatactgtttttctggcagtggcagtgaaacaatctttaggtttgacgtggtgataggctgtgatttgggtgacgctgttccattagagttctcactggcacctggccctccctcttctgaggatgctgctttctttgcagcccttctaagtaatggttttttcttttatacatcacataccacacagctgagaggagggatagatatttttcttttttgcctcttctaggccactgttcttccctataaactccagtttctttgaaatacatgcccctaagggccagttgtggtggctttcgcctgtaatcccagcactttgggaggccgaggcgggcagatcacgaggtcaggagatcaagaccatcctggctaacggggaaaccccgtgtctactaaaaataacaaaaaattagccagttgtggtggtggacacctgtagtctcagctatttgggagactgaggcaggagaatagtgtgaacccgggaggtggatcttgcagtgagctgagattgcgccactgccctccagcctgggcgacagagactccatctcaaagacgaaagaaatacgcgcccctagattaaactatcccttgcccttttgcactcatccaaaagtctcttttcatcagtgattttaggatctgactcattgtgtttttctctacttcaactccttttatcattcttaatgatttctgtattgctaatcaatccagtaatccagtacctacttcttagtttcaaaatcactcactcttgcttagctattaccaataatcataaccactgtcaaatctcaattgcaagcgtattactctttaactaccacctcctatccttaaaccatgttttatctgttttttttattccagccattctttaaaccctaccgtggggcccaagcatttcctttatatgcattcttcctttcttctgctgcttattttctgtaattcattgttataatcactccattgcattcttcagcttgtttcccccttctctccctccatcatacttgaatgacaaaaatctcaaccctggttaaaaccaaatcttggccttgtccattcctgtaccagagtagcaggatatggctaaaaaataacataaaacatgatgattggttttacttttttcttaaacgatctatccatccattcacccatccatctgtctatcaaagtgactaggcctctctgaagcccaggctggagtgcagtgacatgatcacagctcattgtagccccacactcctggcctcaagtgatcctcttgcctcagccttttgagtagctgggactacaggcttgtgctaccgcacctagctaaggttttactttaaatttattataatcacaaaattcagatgagcctttagtgctgcctgatatttctactatgttttcttagtaaatccccataccactctccaagatgtttataaaaaatcatgtaccactctccagacgtttataaaaaatcatgtgccactcttcagatgtttataaaaaatcatgtgccactttccaaggtgactaatttcacagcttctgtcttcaaacctttaaccactttcctctcccttccttacacaccttgcgtatggccttccattacattctgctgagaacatagaagcaattaaaattatgttcttacctttctaccagcaagtgtactaatttgcttatatcttcacctgtgctttgcgactactaaaatagatgaatggtcccctacctctagcgaagaccagtccctcacttgtgggctggatcccagctcctctcacctactcaagatgttcctgctttcatctctccactctcttgtataatcagttccccccccgccctttttttttttggtaatgtacctataagcagaaaaataagctttttaactccagtaattaaaaagaaaaatcttctcttaattccatgaaactccagctgcctccccatttttattttttccttaggattgtctctagtgtgccttctccttttcttgaactccgcctcctgggttcaagcgattcttctgcctcagcctcccgagtagctgggattacaggtgcgtgccaccacgactggataattttttctttttttttgagatggagtttcccttttgttgcccaggctggagtgcaatggcgtgatctcggctcactgcaacttctgcctcccgggtttaagcgattctcttgcctcagcctcccgagtagctgggtttacaggcatgagccaccacgcctggctaattttgtatttttagtagagatggaaggggtttctccgtgttggttaggctggtctcgaactcctaactgcaggtgatctgccacctcagcctcccaaagtgctgggattacaggcatgagccactgcgcctggcccctggctaagtgtttttttatttttatatttttagtagagacagggtttcaccatattggccaggttggtctcgaattccggcctcaggtgatctacctgcctcggcctcctaaagtgctgggattacaggcatgagccactgtgcctaaccatcttttagtaatggtatttagagatcacaatttgagtgctggcatgcttattgctactgggtttgttatgtagttattgtgaattcacatttaggaatatagagtttttaattctttgattttagatacttgtatcttttttcttttatagttaaaaccttggttcctaatgatatcccttcttaaaaaccctgtctgcccttgacctccagcccaccatgctgtggttttcctaacttgttgcctgcatctttcagatccctttcatggatcttaggtatatctctaaataagatctgtgtgtcagtaattaccaaacttttatctttagtcttgacatctaccctgaacacctagctttgactaactcctagctttggcatctccactttgaagtccaaaaagcatttcaaactgaacatgtctatgaaagacttattttttttttctatccatgctatctatcaggttttccatttccataagggtgacacttcttgtactctggttcctatatattatactgatagagccgctcagagtgcttcttaaccagtgtaatgcctgttatgtcccaccctcactccttgtctttcagtggcttcccagcacacttagaataaaatctgaagtcttaggctgagcgtggtggctcatgcctgtaatcccagcactttgggaggatgaggggcagatcacttgaggtcaggagtttgagaccagcctagccaacatggtgaaaccctgtctctaccaaaaaaaatacaaaaattaactgggtgtgatgttgtgcacctgtagtcccagctacttgggaggttgagataggagaatcacttgaacccaggaggcagaggttacagtgagccaagatcataccactgcactccagcctgggtgacagaacaagactctcaaaaaaaaaaaaaattgaaaagtaaaataaaatctgaagtcttgaataaaacccaagatcttgaccatgacccctgaacagggcagagtatccattcttcagacactcttcatagaataccatggtgagctggcatatttattgtacgatatagaaacagttttactggcagaaaacacattaaaccatttgaactctgaatacagttgtcctcataaaaaatgttcattgtactattttgaggttttccattagtagttcttacaatctttgtcccattatgtgttaattctaacaaaggatatccaataacaaacaccagagtttaagaaaaatgtgccaggtgcggtggctcacacctgtaatcccagcactttgggaggctgaggtgggcagatcacctgaggtcaggagtttgagaccagcctggccaacatggtgaaaccccatctctcctaaaaatacaaacattaaccaggcgtggtggcgggtgcctgtaatcccagctactcaggaggctgaggcaggagaatcgcttgaacctcctgggaggcagaggttgcaatgagctgagattgcaccactgcacttcagcctgggtgacagagtgagactccatctcaaataaaaaataataataataattaataatagaaaaacttagattgttttaggtatagcccactcttagtttttgtgtgtagcatctagcttggggaaaccctggatttctggaatcatatttatacacagtcacactagactaatgtaattcttttgggatgcaaaccacacgtttgacaccttaaatagcttttaggtatttggcttctcagctcctatttttagttacaaggggtgtacatgtgtgggtcagggtagctctttccacagatgattagttttagccatgttactagttattgcacacattatctgactgtgtcctcaaaacagccctgtgagtgtattagtcagggttctctagagggacagaactaataagatagatgtatatatgaagggtaatgtactaaggaatattgactcatatgatcacaaggtgaagtcccacaataggctgtctgcaagctgaggaaccaggaagcctgtccaagtcccaaaacctcaaaagtagggaagctgacagtgcagccttcagtctatggccaaaggcccaagagcccctggcaaaccactggtgtaaattcaagagtccaaaagatgaagaacttggagtctgatatttgagggcaggaagcatccagcatgggagaaaggtgaaggctcagcaagtctggtccttccacactcttatttctgcctgatttattctagccgagctggcagctgattagatggtgaccacccagattgagggtgggtctgcctctcccagttcactggcttaaatgttaatctcctttggaaacaccctcacagacacacccagaaacaataatttgtagccttcaatccaatcaagttgataatattaaccatcacaggaaggtaccagtatcattatgtttaacagtagaaaccaagacaaatgcagctaggaagtgggagaactgggatcagatgcaggcagtctgattctcaatcagttgctcttaccgactcctttactctctctcataccagtaagtgagtagcctgctcagtcaagtgctatattagtagggccctttacagacatttacttcgcacagtcactcagtgagacggctattccagtcttacaatggagaaagtgaggctcagagattttaagtaacttatcctagatgactttactagtaagtataagaatcattatttgaactaaaatctttctgaatcctcagcttgtatttttttccagtgtactgtgctgcctctttactagcattttacatcaattttgaatctctttactagctgtttaggttgatttttgcctttttgttttaggttattctatatttgttgttaagggtgacctgccagattgcgaagctgaccaactcctgcagatgatcagggtccaacagatgcaccgaccaaaacttattggagaagaattagcacaactgaaagagcaaaggtaaaaatgaggcctgcagtatggaacatatgacgatatttcattatgagaataaaattttcatgcttacattgaatatgtggtccttgtgttgtcggcacctctattttggaccttacattttagtgaagtttattagttcgaacgtgaatcaactctttgaaatacttaaatatattaactaagttagcaggtatggtgtattcctagcacttcaggaggctgaggcaggctgattgcttcaacccaggagtttgagaccagcctgggcaacatggcaaaacctcacctctacaaatagtacaaaaattagccagacgtggtggtgcgtgtctgtagtcctagctacttgggaggcagaggaggaaggatcacccaaaactggggaggtcgagactacagtgagccacaatcacaccaccgcactccagcctgggcaagagagtcagaccctgtctcaaaaaaagaaacagagaaaaaaaacttagttggattcaaattacaacacaatcattatattactagagcttatttgccagaaaacgttttaagttttggcttacgtaaagcctttacattacaaatgcctttatgttatgtctaaaatagaagattggttgcagttactaccagtgcttttgttctttagagtccataaaacagacctggaacgagtgttagaagcaaatgatggctcaggaatgttagatgaagatgaggaggatttgcagagggctctggcactaagtcgccaagaaattgacatggaagatgaggaagcagatctccgcagggctattcagctaagtatgcaaggtaaagacattctgatgtgtgttgtattcattgctgaagaattgattccaattattcttaggtttcctggaagttaatgtactcttagaagtgttttgacaattactgcagaagcaatagctatatagtgggctttccctttagatttcttataatggaaataactttttacaacctatattttattaggagtagttatatttttactcctggttatttatttggtttcaataacctgtactaacacagtagtcaattgtggtgttaatctttgtgggtatcagttgacccttacccaaatcagctctttcataaatgtatgtcattagacactatggaagggcctggacaggggatataaactgattatacaaaaagccaacatttattggctatgcaacttaaaccttaagcccgctttggtgggcccagttttttagtgatataaactatcaatttcaaaagtgaaaacatatcccctatacagtctaggcaaagaaaaatgttaagacatagctcgaagttgcttaattaaaagtttgaagtgggttttttgttttatttttctctaacttatgtgtatttgcttctactttctaatgaaattatttatcaattgatttccttagatatccagataaaattgagattccattaatgggaagattattttcatcctgaacttttcttgcctctaggcacacctctgagtactccatatggtgtgcaatcccatttttgattaatagagtcctgctggattagcagggacagaaatcagctttagatttcttttgttttttgaattaagagtctcactgtcgcccagcctggagtgcaacaatcttggctcactgcaacctctgccttccgggttcaagcgattctcctgcctcagcctcttgagtaactgggactacaggcacctaccaccatgcctggctaattttttgtacttttagtagagatatggttttgccctgttggccaggctggtcttgaactcctcacctcaggtgatccacctgccttggcctcccacagtgctgggattacatgtgtgagccaccacgcccagccagaagagtagaatattcttcaagaaaaaacattttaaaagcttactcaaatgaggataaacaaatgtattgttgcttgaattggtaaatacagtgattggtttttgttctgttgtgttttgttttcaggtagttccagaaatatatctcaagatattccacagacatcaggtacaaatcttacttcagaagagcttcggaagagacgagaagcctactttgaaaagtaaagtagttggtacaaattaaagtagcacgtttaatatttgctttggctattttgtctgtttgtaaatggttactgcctgaatcctatgaatatttgaatgcatatttaaaaaatttacagcaaataggacaggcacggtggcttacgcctgtgatcctagcactttgggaggccaaggtgggcagattgcctgaggtcaggagttcgagaccagcccaggcaacacagtaaaactccatctctactaaaaaatacaaaaaaattagccgggcgtggcagtgtgcgctgtagtcccagctgcttgggaggctcagccaggagaattgcttgaacccagcaggtggaggttgcagtgagccgagatcgcaccactgcactccagactggttgatacagtgagactgtctccaaaaatatatgtgtgtatatataaataaaaataaaaatttacagcaaataacatgaagcaaaatgtagttttaatgaaaaagtttgcctcaatactggataaatttttgaaactgagtgaaggaaaccttgtacaatttcatttattaaaagaaaaatgaaattaggacaaggcaagaagaatacctattgatcctttggatgtgcttcttgcttacctgattaaccctgcaaaatttctctaccaatcagtaagaaaaacagcttttgaggtatgggagcacattcccaaatagacatgggtagttcatttagctgctcatggctgctgcagggggtcctgtaggcctgttagcatcaggagaatggatgcaaaccataaatctggatcaactcctaaaactttaccttgtgcccagccttgtaagtgcttgctaaataggaattccactgtatgaaaatacattcttttcaagtaactatcattcagacttttgtcccccacttttttaaaaaaagaaaaagaaaaggctgggtgcagtggcttacgcctgtaatcccaccattgtatgaaataggaattccactgtatgaaaatacattcttttcaagtaactatcattcagacttttgtcccccacttttttaaaaaaagaaaaataaaaggctgggcacagtggcttatgcctgtaatcccaccattttgggaggccaaggcgggtctttgggagtgagtttttgggaggcaggagaatcgcttgaacccgggaggcggaggttgtggtgagctgagatcgcgccattgctctccagcctgggcaacaagagtgaaactccgtcttaaaaaaaacaaaacaaaacaaaaattagctgggcgtggtggtgggtgtctataatcccagctactcgggaggctgaggcaggagaatcgcttgaatccgggacgcagaagttgcagtgagctgagattgtgccactgcactccagcctggggacaagagcgagacctcgtctcaaaaaaaaaaaaagaaaaactccatgttaaaaattacaagataaataatcagacccgctgatcctaggtcagaaaacaaaagactcatagctgaatctgacctgccattgctgtatttcatccattctaagatgcacatagtttcacatttcaatgtctctgaaattgagaagtatcttacaatcataattgacagtatattagcagcacctaaaaatattggctcattttacatttgatggtataatgaagaaaatatttacctttttttctgttttgtttttaagtcacaactcagaagtagatgaaggaaaattctgatcagctgacatcctcttaatgtgagatatttctagtctttattcagcatagattaatggctaattatatgttacatttcaaagtagtgcttattagtgctttttacttttaagtttcaaaattaacttttttattaaactccaaatttatacaaaagtagaaaaactagcataatgaactcttgtttatcacccagattcaacaaatactagcacacggccaatcctgcttttttttttttttttttttttgaggtggagtcttgctctgttgcccaggctggagtgcattggcacaatttctgctcactgcaacctctgcctcctgggttcaggcaattctcccacttcagcctcccatgtagctgggattacaggtgcacaccaccatgcccagctaattcttatatttttagtagacacagggtttcaccatgttgcccaggctggtcttaaactcctgacctcaagtgatccacctgcctcggtctcccaaagtgctgggattacaggcatgagccactgcacctggcccagtctcgttttataatactcccatctcccattctttccactgtcccacctacaagtttggattattttgtaacaaatctcaatcatcatatcatttgttctataaccattttaatatatgtctctaaaatatatgaactttttttaacatagttaaatgctattgtcataaaataatcatgataattaattgtaattctatatcaccaattatctagttaatgtaaaaaataacttaaatctaaggccaggtgcggtggctcacacctgtaatcccagcactttgggaggcggaggcgggcgaatcacctgaggtcaggagttcaagaccagcctgaccaacatggagaaaccccatctctactaaaaacacaaaaaaatagctgggcgtggtggcgcatgcctgtaattccagctagttgggaggctgaggcaggagaatcagggagacagaggttgtggtgagctgagatcttgccactgcactctagccttggcaaaaagagtgaaactctgtctcaaataaataaataaataataaaaaaataacttaaatctacttaattagaaaaactaatattctggaaattttattttaagaaatatctaaattggccgggcacgatggctcacacctctaatcccagcactttgggaggctgaggcgagcagatcacctgaggtcagaagggtcaggagttcaagaccagcctggccaatgtggcgaaacaccgtcgccactaaaaatacaaaaattagctgggcatgatggcgagcccctgtaatcccagctactcaggaggctgaaacaggagaatctcttgaacccaggaggtggaggttgcagtgagctgagatcaccccactgcactccagcctggatgacagagtgaaactctatctcaaaaaaacaaacaaaaaaaagaaatagcaaaattaaaagaaagcatacatggccaggtgtagtggctcatgtctgtaatcccagcacttttggaggctgaggcaagcagatcatttgaggccacgagttcaataccagcctggccaacatggcgaaagcccgtctctcctaaaaatacaaaaaaattagtcgggcatggcggcgcacacctgtaattgcagctactttggaggctgaggcaggagaattgtttgaacccagaggtggaggttacagtgagctgagattgtgccactgcactctatcctgggtgacagagcgagactctgtctcaaaaagtaaaaaaggggccgggtgcggtagctcactcctgcaatcccagcactttgggaggccaaggcaggcagatcacaaggtcaggagatggagaccatcctggctaacacagtgaaaccccgtctctctactaaaaaatacaaaaaaaattagctgggtgtgatggcaggcgcctgtagtcccagctacttgggaggctgaggcaggagaatggcgtgaacccaggaggcggagcttgcattgagcagagatggcgctactgcgctccagcctgggcgacagagcgaggctctgtctcaaaaaaaaaaaaaaaaccgtcacctcctttagtaactgatgttagtattttggcacattctctttctgtgacttatacacacttaccttgtaagtgttgtactcatttcctatgacagtaaatagtctttgtaacaggctgcatgatatttcataaaatgaatggatgtggcataatttatatatgtgccttttgaattatgctattataattaatactgcaatgaacaattcttatattgcctctatgcctcaaatgtctcatcatttcttcttttttctgaggatgtcagattactgggttaaagggtatgaatatttttaagaccttggtacagatttctaaattgctttccagaataattcccatgtgatactttcatcatgtttatttcagactttctttttccttttttgagacgaaatctcactctgtcacccaggctggcgtgtagtggcacaatctcagctcactgcaacctccgccctctgagtttaagcgattcttctccttcagcctcccaagtagctgggatcacagacaagtgccaccatgcccggctaattttcgtgttttttgtagagatggggtttcaccatgttacccaggctggtttcgaactcctgagctcaggcaatctgcccacctcggcctcccaaagttctgggattacaggcgtgtgccaccacacccggccatcagacttttttttatgccattttttgccatataatggtctaaagacatacatcatatagaaactataatacaaaatttataggtatatctaagaaaatgaaagtatatttaaagcataaaaataaacccctcttttacttaaaatttttaaaaaattggattaaaaatatgaaacttccaacaaattgaacttttttttttttcttttttgagacagggtcttgcttttgtcacccagactggagtgcagtggcgtgatcttggctcactgcaacctccacctccctggttcaagcaattcccctgcctcagcctcccaagtagctgggattacaggcgcatgtcaccacgcccagctaattttttttgtatttttagtagagacagggtttcaccatgttggccagactgggctcgaactcctgacctcaggcaatttgcctgcctgggcctcccagcgcgctgggattacaggcatgagccactgcacccagcctgaacgttttatagtagtaaagataattcagtaatgcccaataatgactaagtaagttataacaagaacaatgtcagcaataactagtgctttttagtaaacagggtcaggcaaccttgtaccctttaaaaatgttcaaatcttgatataactccttcctaattggagcaggattgattgaggaggaaagtgtgcagtgatggttaccagcttcagcctcttggcttgactttgcaaatactgtggagaatttggaaagagcttgagaatatcttacatagtcacatgttgctgagaagagttaagaactaacttcttgatgttcatttttaatagtggtttgcattcaaaaccttatagagctcattagtaggagagctgagaagctaatatttgcttttcactaaaattcctgattacttagcctaggtagttccttgtctctctaggttctgtctttgggagcttggctctaaggttatcaagctaactctttcttacctcttacccttcccaaattgaccctggttctgatttgttattcgtatgattttctagtttttcttttccctttttgagtatttgaagcttcatactgaatatagtaatcatagtattcatgcataaagaaaatcataaagtaattgcataaatccataaagtaatcatagttttcatgcattaaaaaaactagtttaggccgggcgctgtggctcacacttgtaatcccagcacttttggaggccgagacaggcgaataatctgaggtcaggagttcgagaccagcctggccaatatggcaaaacctcttctctactaaaaatacaaaaaattagccgtgtggtggtgggcactgtaatcccagctattcagcaggctgaggcaggagaatcacttgaacctgggaggcagaggttgcagtgagctgaggtaatgccgttgcactacagcctaggcgacaagagtgagactcttatctcaaaacaacaacaacaacaaaaactagtttctctctagtgtaaaaaatactgttaagccgggagtggtggctcacgcctgtaatcccagcactttgggaaggcgaggcgggcagatcacaaggtcaggagatcgagaccattctggctaacacagtgaaaccccgtctctattaaaaatacaaaaaattagccaggcgtggtgacaggcgcctgtagtcccagctactcaggagactgaagtaggagaatggcgtgaacccaggaggcagagcttgcagtgagccgagattgtgccactgcactccagcctgggctacagagcgagactccatctcaaaatatatatatatatagactgttaaaaagtctccctattacagattcataatttatgagtcattaaataatatttttaagccatgacattttttccagcaggagtctctaaatctgttttaccactgtaaaaccccaagcaaaactctactacatcagctgtgtcactgtaaaacctgccttaactcacatcagtatgaaattaagcaatgtgtgtgaaactattttataaactgtaaaggattccatacatgcatgttggcaattattaatgtcttctctaggtgtggctttgaaacagatgcagattctttctgctacaaaaaacatagttacaaatgttttgtaacaaggagagacacaaatatcttcatggacatggattgctatgagtttttgattgactaatacttgagccaccacttcagtgatggtataatttatcaaacagtattgagaaacagaaactactggggatgttttaaggagaaaaagtacttaatagagaaattagggttttacataatcttaagaaaagatgaaggtgcagatcttagccaggcctccagagtaccacaaaccaacttgcaggaagagctgtaaccactgccccaattggcacaatgggtaatgaggatattaaatttaagaacacactgctatagcaatgatcctgggcttagaaagctgccaccacaattgcctagacatgggaagtctggcccccactgcaaaagcagtgaagcagaattttgggactggcatctccatgactttgcttgccaccagagaacaaccaaagtagggagatggctggccttatttctgcctatttattttattttattttttgagacagactcttgtctgtcacccaggctggagtgcagttgtgtgatcttggctcactgcaacctccacctcccagcttcaaacaattctcctgcctcagccttctgagtagctgagattataggcacccgccactgtacccagctaattttcttatttttagtagaggtgggtttttgccatgttgaccaggctggtctcgaactcctgacttcaggtgatgcacctgcctcagcttcccaaagtgttgggattataggcgtgagccaccatgcctggcccatttgtgcctttttttttttttttttttttttttgagatggagtcttactctgttgcccagaccagagtgcaatggtggcatcttggctcattgcaacctctgacttccagtttcaagcaattctcctgcttcagcctcccgagtagctgggactacagctgtgcagcaccatgcctgcctaacttttgtttctgttttgtttttttgagatagagtcttgctctgtcacccaggctggagtgtagtggtatgatctgggcttactacaacctccgcctcccgggttcaagcaattctcctgcctcagcctcctaagtagctgggactacaggcacgcaccaacacacccagctaatttttttgtatttttaacagagatggggtttcaccatgttggccaggctggtctcgaactcctgacctcgtgatctgcccgcctcagccttccaaagtgctgggattacaggcatgagccaccatgcccagacaatttttgtatttttagtagagacagttttgccatgttggccaggctggtcttgaactcctgacctcgggtgatccacctgccttggcctccggaagtgctaggattacaggcgcaagccaccgtgctcaacccattttggccttttaaagctcatgtgagcacttaatttgtaaccagaatcctacttgtaaaataatctaagacatgtagcttttagctttgtagcctctataatattaatggcacagtgggagtggatgctgagtgccacttaaacatgttccatctcagtgtcttcacagctggaaggtgtcaacattgtttcaaggtgggcaattgatttacttctcacttttcataaactaaaagtagaataaaggctattcctctaaaattgctatcttacctgtcactcccttgcattctcacctaccttcttgagtggaggggaagagggcatggagtgatagctgatgtgccaggaattctccatactcagtccgtctttcttgtgccatgtcgcagcatcaggatttgctaatgggagggtactgcccttatgtgcatcattagccatgcacactaaagtcttacacctacacacaggtcagtattcgggcttagagaccaacagggaaaaattgcagttctcattggttgaactttattgttcacagttttaaaacacaaaattgagaggaactctagaaaaaatgtgtcattctattaataattgttgctggtagtttaaaaattctggttccttttcaaattcctatataccccccccccctttttttttttaataccttgatcttagccaaaacaccgagaagcaatcttttttttttttttttttttaacctatggcttctcactgagattgtcagctgttggtaagttttggtttttggttttctgtgtttgtatttacatgtatgaaatctagattgagtatcccttatccacaatgcttgagactagaagtgttttagatttggggttttataggatttgtgaatatttgcactatacttgccagttaagcattccaaatccaaaatctcaaatctgaagtgctgcactgagcacctcctttgagtatcatgttgatgctcaaaaagtttctgattttggagcatttcgatttcagattttcggatttgggatgcctgacctgtaatttcagatttacataaaagcagaaatagtacacagagcgccttatatccttcacccagattccccaattgttggcctttctgaaccatttgggaataatacgcagatatgattttccattatgtctcagttgttcagtgtgtattttctgagtacaagaatatattcctacatatttacatcataactatcatgtttaaacattttaaaagtggggatttgaattacattgtttttccttttgaaaaaattacagaggagctgaatgcaatcaatattacttaaaatctgataatgtgtgttaaatagtagttttcatttatcaagtgttcagtaaatgcttactatgttgtaacagcacggttatcagcactgttgaaatagatgaacaagttaacatttgcactctcattagcttacacgccataaagagggaaataaggagaacaccagatggtaagtttatgctgagaattaaaacgaagtgatgaaataatgagaatgtcagatggctacttttggtgggatggtcaggaaaggcatctctggggagattgttaagctcagacctgaatcaaaagaatgagccagccatggaaacattatgttaactcacatggtagtttgagatgctttatctgatcaaaggtacttattttcagtgactttcaacaatattaagggtctataaaccaacactcatttgcataagaatagctaccagtgaatctttttgtatgataggtttgtttgtttgtgtgtttgtttgttttttgagacagagtcttgctctgtcacccaggctggagtgcagtggcgcaatcttggctcactgcaatctctaccttcccagttcaagtgattctcctgcctcagcctcccaaagtagctgggattacaggtgcctgccaccacacctggctaatttttgtatttttagtagagatggggtttcactgtgttggccaggctggtgtcaaactcctgacctcaggccatccacctgcctcggcctcccaaagtgctgggattacaggtgtgagccaccatgcctggccatgataggttattttgtgatgaaaatacctacctcttaatttgtctgataaatttaaattttatgtctaggtttcctaggatcaacacttctatattttaaagtaatctatatcagactaactgctcttgcattcttttaatgtcagtgactactttgatttgtggaacagtgtattttccacatgaatagtttttctcatggtgtatttattcttttaagttttgttttttaaatatacattcacttttgaatgtttcagacagcagcaacagcagaagcagcagcagcagcagcagcagggggacctatcaggacagagttcacatccatgtgaaaggccaaccaccagttcaggagcacttgggagtgatctaggtaaggcctgcttcatcatgttcgctaccttcacacttttatctgacatatgggctccctctgatttttgctttacattattcttcatcccctctttaatcatattaagactcttaagtaaatttttaatctactaaatttccctggattaaggagcagttaccaaaaaaaaaaaaaaaaaaagctagacgtggtggctcacacctgtaatcccagcactttgggaaaccaaggcaggagaggattgctagaacatttaatgactactttaacataataatttaaacttcacagtaatttgtacagtctccaaaaattccttagaaatcatgatttattttttattttttgagacggagtctcgctctgtcacccaggctggagtgcagtggcgcaatctcagctcactgcaagctctgcttcccaggttcacgccattctcctgcctcagcctcccaagtagctgggactacaggtgcctgccacttcaactggctaattttttgtatttttagtagagacagggtttcactgtgttagccatgattgtctcaatctcctgacctcatgatcttggcctcacaaagtgctgggattacaggtgtgagccactgtgcccagccagaaatcatgaatattagtaggtgaaaaataaatacattttaccacccagaaaatgaaaaatacttgagtataatctaaataacaatgggaagtgcagagttactttccaggtctcggtttaaatatgtcttaaagtttggccaattagtagtagaagttgagagaaaaagtaactgtatctgacaaagaaattataagcagaatatataaagaactcttaaaactgaacaataagagagcaactcaataaaaaggtgaagaatttgaaaaggtacttcaccaaataagacatagggatgacaagcccatgaaaagactctcagcatcactagtcacagggagatgcacaataaaaccacaatgagataccacggcacccctgtaggtgtggcttaatgaggaaataaaactgacaataccaagtgttgacaaggatccaggcagctgagactcatacactgttaatgggaatgtaaaagtgtacagctttgggaaacagtttggcatttttttgataaatgtatacttagccatatgatccagccatcctaatcatgtatatataaccaagagaaaagaaaacttaggttcacataaaaacttgtatcaaatgcttatagctggccaggcatggtggcccatgcctattatcccagcactttgggaggccgaagttggtggatcacctgaggtgaagagttcaagaccagcctggccaacatggcaaaaccccgtcttctacttcaaatacaaaaattagccaggcatgatggcgggcacctgtagtcccagctcttcaggaggctgaggcaggagaatcacatgaacccgggaggcggaagtttcagtgagccgagatcgtgccactatactccagcctgggtgacagagcaagactgtctcaaaaaaagagggctggacacagtgacttacgcctgttatccccgcactttgggaggccgaggctggtggatcacctgaggtcaggagttcaagaccagcatggtcttggtcaacatggtgaaaccccatctctgctaaaaatacaaaaattttctgggtgtgatagtgggcacatgtaatcccaggaggctgaggcaggagaatcacttgaacccgggaggcagaggttgcagtgagccaagattgtaccactgcacttcagcctgggcgacaagaccgaaactccatctcaaaaaaaacaaaaaaggattatagcatctttattcataattgcccaaaattataaactgcctaaatgtagaccttcatttagttaacgaatacacaaactgtggtatatccaaacaattgaataataaaagggatgaactggtacttttttctattcctcctcttaagtacagccaaaacacctcaacatttgtataaaacataagctgggccaggcgcggtggctcacacgtgtaatcccagcactttgggaggctgaggtgggcagatcacctgaggtcgggagttcaagaccagcctgaccaatgtgcagaaaccctgtctctactaaaaatacaaaattagttgggcatggtggcgcatgcctgtaatcccagctacttgggaggctgaggcaggagaattgctcgatcccgggaagcagaggtcgcgctgagctgagatcgcaccattgcactctagcctgggcaacaagagcaaaactgcgtctcaaaaagaaaaaaacatgagctgaatctcaaaggcagggagaagacagaccttggaaccagaggagcagcgtggtggggagtggcctggattttctttttgcctcatttatcctgggcttggtgctggagaagctgtgggctcagaccaagagaaaaccccataaaaagcctgctctctttagccaaaagaggcagcctagcaagacaaaaacttttagataataagcacttgactatagtcaaacaccacagaataaactggccccaaaccctgtcagcaaaggccgagtggaagtcaagatatgtaccgcaacctggaagtcataaggtacacttctcccctttcccagccaacatggtgtcagagaaggctgcctggggagctggggttttccttccctccaggaggtgataacactcctttgccacggtgtcagtggtcacagggagcctgaacgtccacctaataatacataggcatctctctggctcctatgggggtaatgtcagagaagaggcctagtagagaatccagactgttgctggcatccagcagtaacaaggacacctccacaatgtccgtggaggccacgtggggatcagtaacaaggcattcctctccctcccagtcagatgtcagtggaagactaggggactagaactcccgtgtgcattcagcagtaatgcccatgaccaccactccgtgttatcacaggccttgaagaagcctgaactttcactcccctctggttgtagtgaggtggcactccctttttcctgctgccagtgctgtgtcagaggaggcttgccaaattggaagatgtaaataagattcacattctcataacgtaataccccaaattttcaagattcaattgaaaatcactaagccgggcacggtggctcacacctataatcccagcactttgggaggccgaggtgggctgaacacttaaggtcaggagttcaagaccagattggccaacatggtgaaaccccatctctactaaaaatacaaaaattagccaggcatggtggcgcatgcctgtaatctcagttactggggaggcggaggcaggagaatcactgaaacctgggagacagaggctgcagtgagccaagattgcgccactgtactccagcctgggcaatagagcaagactccatctaaatttatgtcatggagtcccagaaggagaggagaaagagggtggggctgaaaaaatattggaggaagaagtcatggctgaaaaattcccaaatttggcaaaagtcagaaacctatggattgaaaaagctgaatgaagttcaaatatgataaactcaaagaaattcacagagacatatcatagtcagatttctgaacactgcagacaaaaaatgaagatcttgaaattagcaagaaacgaccttacctacagcaatttgaatgacagcagatttcccatcagagatcataaaggccagaaggaagggatacatacaacaatttttctagtgctgaaagaaaatatctctaggctgggcacggtggttcacacctgtaatcccagcacttttggaggctgaagtgagaggatcacctgaagtcaggagttcgagaccagcctggccaacatggggaaaccctgtctctactaaaaatacaaaatttagctgggtgtggtggcacatgcctgtaatcctagctacttgggaggccgaggcaggggaattgcttgaacctgggaggcgaaggttgcagtgagccaaggttgggccactgcactccagcctgggcagttgagtgagactccgtctcaaaaaaaaaaaaaaaaaaaaaaaaatttagccgggcttgttggtgggcacctgtagtcccagcactcaggaggctgaggcaggagaattgcttgaactcgggaagtggaggttgcagtgagccaagcttgtgccactgtactccagcctgagtgacagagcgagacctcgtctaaaaaaacaaaaacaagaaaacaactctaaacccagagttacacatccagagaaatatccttcaggagtgaagggaaaattaacaatttttcttcagcagacctaccctaaaagaatggctaaaggaatttctctaaaccaaaaagaaatgataaaagaagtaattttggaacatcaggaaggaagaaagaacaataaaaagagtaaaatatgggtaaacagatagactttaccctccttttgaattttctaaattgatggttgaagcaagaattatagcactgatttgtttttcagtatatatactggaaatatttaaggcaattatgttacaaatgaaggagggtcaaagtatataaagggaggtaacctttctatatttcttttgaattgatgcaggcactttggaaagtaatttcactatttgtttaaaaacgtaacataccctgaccatatgacatagcatctatactcctgggcatttgtcccagaaaaacagaaatttatttatttaatttaaaattttttttttcagtattacactccgtaagtgctgtaattagcacttagagaggccaaggcaggcagattgcttgagcccaggagttcaagaccagcctgggcaatgctgcacaatcaaaaaagaaaaacagacatttagaaaactattttaaatgtctttaattgctgaatgcctctttggctaatatttgtaagatccttctcctcctcctcctcctcctcctcctcctcctccctccctccctcctcctccctccctccttcttcttccttcttctggcagagtctcactctgtcacccaggctggagtgcagtggcgtgatctcggcttactgcaacctctgcctcctgagttcaagcgaatctcctgcctcagcctcccaagtagctgggactacaggcgtgtgccaccatgactggctaattttttgtattttcagtagagatggggtttcaccatgttggtcaggcaggtctcgaactcctgacctcgtgatccacccgcctcagtttcccaaagtcctgggattacaggtgtgagccactgcgcccagcctggaagatcattatttagacctacaactgatgcattgttccactgacacaattgcccaggctggtcttgaactcctgggctcaagcagtctgcctgccttggcctccctaagtgctagtattacaggcttgagccactgtgcccagccaaaaatagaaatttatattctcacaaaaacatgtacatgaatgtttatagcagctttacttgtaataatcaaaaactggaaatgaccaaaatgtcctacagtgaaacaaactgtagtacatccatagcatgtaatactctactgtcaggattaaaaagaaaccaactgttggcacaggcagcaccgtggctggatctcaggggcattatgctgagtgcaaaaaagcctcaaagggtcttatactgtatgattccatttgttcaacgttctaaaaatgacagctgtatagagatagagaacatattagtggttgccgctagttagagaaagtgggtgaaggagaggtgggtgtgaatataaattgataggagggagatctttgtggtattataacacttctatgtcttgattgtagtgctcatggttacatgaatacacatgtgtgataaaatgccatgtagaactacatataacattgtgccaatgtcactatctaggttttagtttgatctttagttacgtaagatgtaactgttgggtgaaattgggcaaaagaatacccgaaacctctctgaaatatctttgcaacttcctttgaattgacaattatttcaaaatagaaagttgggtttttgttgtgtatatcaacatgagtatatcaacatgaattgttgatatacacaacatgagtatatcacaacatgagtatatcaacatgaactgctgatattgttgatatacacaacaaattggtgatatacacaacaaatcccaaatgcattacactaagtgaaagaagccatattcaaaaggctacatatctactgatgccttttatatgacatgcaggaaaagatgaaactgttggacagagaatatactgttggctagctgggattaggaattggggattgaccacaaaggggcagcatgagggagttttctggggcaatggaatggttgtatatcttgacagtgtatttgtcaaaatatatagaactataaaagtaagttttgctttatatgcattaaatcaaaaaaagaaactcgtgctcaaatagaaatacattttctgagagcttaccttttgatgactttgagaattttctggaaattttaaagaaatgtggttttgtttcccaacaggtgatgctatgggtgaagaagacatgcttcaggcagctgtgaccatgtctttagaaactgtcagaaatgatttgaaaacagaaggaaaaaaataatacctttaaaaaataattgagatattcatactttccaacattattctgtgtgattacagcatagggtccactttggtaatgtgtcaaagagatgaggaaataagacttttagtggtttgcaaacaaaatgatgggcaagtggaacaatgcgtcagttgtaggactaaataatgatcttccaaatattagccaaagaggcattcagcaattaaagacatataaaatagttttctaaatgtttctttttcttttttgagtgtgcaatatctaacatgtctaaaattaggggcatttttcttggatctttttgcagaccagctaattagctcttgcctcaggctttttccagttttctttttctctcttgtagataatttggctcacatcatctaatagtgactttcatttcttattaaccaaattaacctttcaggaaagtatctctagtctgtgttgataatagtaatggttctagaaggataaacagtcctcccttcaactgtatactgtgtgctccagtgttttcttgtgttattttctctgatcacaacttttctgcgacctggttttcattattttcccacaattcttttgaaagatggtaatcttttctgaggtctagcattttaagtcctgtgatgggatcattatttcatgactggtgcattcctaaactctgaaatcagccctgcgcaagtacttgagaataaatgagcgttttttaaaatgtgtgagcatgtgctttcccagatgctttcccagatgctttatgaatatcttttcacttacatcaaaaccttacagctttgttgcaaccccttcttcctgcgccttattttttccttctccaattgagaaaactaggagaagcatagtatgcaggcaagtctccttctgttagaagactaaacatacgtacccaccatgaatgtataatacatgaaatttggccttcaattttaatagcagttttattttatttttttctcctatgactggagctttctgttctctttacagttgagtcatggaatataggtgtctacttcacatcttttagtaggtatagcttgtcaaagatggtgatctggaacatgaaaataattaatgaaaatgtttaaatttatactgtgatttggcacttgcatcatgtttagatagcttaagaactgtagaagtcatagtacttagtgggtctgtaaataagaaagtccatagttttgataaatattctctttaactgagatgtatagagagtttcttgctgggtcaataggatagtaccattttggtgaaaaccgtgtctctctgaatttgatgttttagtttctgtgttccccatccctcattctccagccccttttgaagctcttttgaatgttgaattgttcataagctaaaatccaagaaatttcagctgacaacttagaaaattaaagtatggtatattgccctactggtgtgtggctgcacacatttcatcagggaaagttttttgatctaggatttattgctaactgaaaagagaagaaaaaatatcttttatttatgattatgaaatagctttttcttggatataacagattttttaagtcattattttgtgccaaagttttctgaagtttcccttacacaaaaggatagttttattttaaaatctaaagttttcttttaataattaaaaatgtttcagaagaattataaaactttaaaactataagagatgttagagtttagtactactccctcaagatttaaaaagctaaatattttaagactgaacatttatgttattacaggtgtgttagtcatattttccatggatatttgttcattacctttttccactgaaaagttacgttaaacttttcatacacttgaattgatgagctacctaatataaaaatgagaaaaccaatatgcattttaaaattttaattttagcgtttataaagttcatatataccctagttaaagcacttaagaaaatacggcatgtttgacttttatttgctagagaggtttttttggttgtttttgtttttgctttttttgagacggagtctcgctctgttgcccaggctggagtgcagtggcgtgatctcggctcattacaacttccacctcctgggttcaagcgattcttctgcctcagcctccagagtagctgggattacaggcgcccaccaccatacccagctgatttttgtatttttggtagagacatggtttcatcatgtttggccaggctggtctcgaactccagacctcaggtggtctgcctgccttggcctcccaaaatgttgggattacaggcatgagccaccgcgcctggccagctggagagtttttaaagcagaggtgagcacacactggatgcgtttgaatgtgtttgtgtagtttgttgtgaaattgttacatttagcaggcagatccagaatcactagtgaactgccatcttggtggggttggcttaaatgtaattgaatgtttagattctatttcttaattgattggccagtatgaaaatatgccagtgcaagtaaccatagtatcacaaaagttaaaagttatgcaaagctatagcttatatatcaggtactgccatttactgtaaaccacctgcaagaaagtcaggaacaactaaattcacaagaactgtcctgctaagaactgtattaaagatttccattctgttttactaattgggaacatcttaatgtttaatatttaaactattggtatcatttttctaatgtataatttgtattactgggatcaagtatgtacagtggtgatgctagtagaagtttaaataagccttggaaataccactttcatattttcagatgtcatggatttaatgagtaatttatgttttaaaaattcagaatagttaatctctgatctaaaaccatcaatatatgttttttacaataatcaacatataaatatttcagtaatataaactgtttgaaaaggctgctgcaggtaaactctatactaagatcttggccaaataatttacaattcacagaatattttgtttaaggaggtgctttgtttttgtccttaaaacttgatttttcttaaggctttattcatgatgccaaagccaatgaggaaaaaaactcaaaaccagttgagtatcattatagacaaaactaccagtagtccatattgtttcatttaatattaagttgaataaattttattccagtcagagcctaaatcacattttgaatgtctgaatttttgatactatttttgaaatcatgctagtgccggccgggcgtggtagctcacacctgtaatcccagcattttgagaggccaaggtgggtggatcacaaggtcaggagttcaagaccagcctggccaagatggtgaaaccccgtctgtagtaaaaactacaaaaattagctgggcgcggtggcaaggtgcctgtaatcccagctacttgggaggctgaggcaggagaatcacttgaacctgggtggcagaggttacagtgagccgagatggtgccattgcgctccagcctgggcgacagagtgagactccatctcaaaaaaaaaaaaaaaatcatgctagtgccaagagctacgaaattcttaaaactcttaaaactggcccattggacttgtacaaatacaaaatagattcaatgcataatcaaaatattttaaaatcttaagtagaaaaataaatcttgatgttttaaatttttaggaggattcgataattaatattgatgacctccaggctgggcacagtggctcacgcctataatcccagcaattcaggaggctgaggcgggcagatcacttcagggcaggagttcaagaccagtctgggcaacatggtgaaacttcgtctctactaaaactacaaaaattagctgggcgtggtggcacacacctgtaatcccagctactcaggagactaagaatcgcttgaacctgggaggcagaggttgcagagagccgagggctcaccactgcattccagcctggcgcaatagagtgagactctgtctccgaaaaaaaaatatatatgtatatgtgtatatatatatgtgtgtgtgtgtgtctctactaaaaatataaaaattagctgggtgtggtggcgggcacctgtaatcccagctacttgggaggctgaggcaggagaattgtttgaacccaggaagcggaggttgccgtgagctgagattgtgccattgcactccagcctgggcaatgagtgaaactcttgtcttaaaggtttttttttttccttgggctactattttctctttctttctttcttttctttcttcctttctttcctttcttttcctttgtttgtttgtttgtttttagtagagacggggtttcaccatgttagtcaggctggtctcaaactcctgacctcaggtgatccgcctgcctcagcctcccaaagtgctgggattacaggtgcaggccaccatgcctggccttgggctactgttttcaaagtgaattgtttgttgtatcgagtccttaacaagtatagacatatgatatatgtgatcctaattaagaaataccagattggatcaactaatcatgtcagcaatgtaaataactttttatttttcatattcaaaataaaaactttcttttattcctggtccctttataaccagcattttttgctttgaaaaatgagctggctttgtagttttttaaagttttaaacataagaaaaatgtcttttgttctatttgctttcatgaatgaagatcattgacatggttggtaaattctagaattttgattttgttttttaatttgaagaaaacctttgctatttttattttttccaaatggtctgacattttaagaatgaatgctaataacttaacttctaaatttatcgtcattggcatgtttaatagcatatcaaaaaacattttaagctggtggatgcatagacaaagcaatgggaaactagtgaaatacacacggatgttcctgaggcacttaggaagctctcagttgtctcttacatagttcaaggaatgttttctgaatttttttaatgcttttttttttttgaaagacaaaaacatacattttaaatgtgattatctaatttttacaacactgggctattaggaataactttttaaaaattactgttctgtataaataaaatatttgaaattcaagtgcagaaaatatctgaaacaaaaagcattgttgtttggccatgatacaagtgcactgtggcagtgccccttgctcaggacccagccctgcagcccctctgtgtgtgctccctcgtaagttcatttgctgttattacacacacaggccttcctgtctggtccttagaaaagacgggcttccaaagcactgttgaacactgaggattctgttgttagtgtggatgttcaatgagttgtattttaaatatcaaagattattaaataaagataatgtctgcttttctatttccttttgaatttgtgtttattgttaattcatagctattcaaagtatgattagagctgagctttgtggcttgcatctgtaattccagctacccaggaggcagaagcaggaggattgcttgagcccaggagtttgagcctgcagtgagctatgatcttgccactgtaattctagcctggtcgacaaagcaggaaaaaagtgtggatggaggaccagcaacatctgtatcacctgtgagtttttcagaaatgcagagtttcaggccacactcagacctactgaatcagaacttgcactttttgcaagatccccaggacactgaagtgtagagtgaagcttgagaagcacggttttatggattgttcttaaccagctgtggtggtgaatatgagtaacgcaggccagcacagtccattgatattctattccagcttactgcctgccaaaaggtccattattactggatcccgagtcttttccaagagaagctaagaattccaaatttttatttgaaatatatttttaaaatggttgctcaattggcagggtgccagtggctcatgcctttaatcccagcactttgagaggccgaggtggaaggatcacttgagcccaggagttcgagaccagcctgggcaacataaagagaccccatgtctattaaaaaaaaaatagagacagaatgctgccttaaaaaaatcataaatgtttgctcaattgatttttaaccctgagggccaaacaaagcacattagtagcaatttttaagagtgctgtttttcctcattgtatctaactctggacaccagaatccaaatgtaatgattggactccacctagactgattgaggaatatattgtcttcacatttagggttgtctattcattttagctttaattaggattgggcacaaattttgaaacataatatgttacaggacagggatcccgatccagaccccaagagggttcttggatcttgtgcaagaatgaattcagggcaagtccataaattgaaagaattgaaagccagttcattaagaaagtagaggaataaaagaatggctaccccataggcagagcagccctgagggctgctggttgcccaccccgcccccccccctttttttttttttgagataatctcgctgtgttgccaggctgtagtgcattggcatgatctcagctcactgcaacctctgcctcctgggttcaagcaattctcctgcctcagcctcctgagtagctgggactacaggtgtgtgccaccatgcccagctaatttttgtatttttagtagagacagggtttcaccatgttggccaggaaggtctccatctctttaccttgtgatgcacctgccttggcctcaaaaagtgctgggatgagcaacctcgcctggctggttatttcttgaggatatgctaaacaaggggtggattattcatgcctcccctttttagaccatttagggtaacttcccagcattgctatggcatttgtcaactatcatggtgcttacgggagtgcagcagtgaggaggaccagaggtcatttcatcgccatcttggctttttcagctggcttctttactgcaacctgttttactagcaagtttttttatgacctgtatcttgtgcagaccttctatttcatcctgtgacttagaatgccttaaccatctgggaatgcagcccagtaggtctcaggctcattttacccagcccttattcaagatggagttgctctggttcaaacgcctctgatatttccctactcccttttataagacaacccttaatcctaagggttgcagagggatgaagatccatcttctgtaacttcttcaggctgaataagggtgatgatattcctgcctatgagagtctcttgtattagggtagaaaggagctcagtcagtatggctctctatccttcctcccttccccagcccctgacaactaccattctactttgtctctgtaattctaagtatctcatataagtggaatcattcagtatttgtagggttttttttgtgactagtgtatttcactttgcatgtcaaggttcatccatgttgtagcatatgtccgaattttcttctttttaaaagctgaataatattccattgaatgatatatgcacattttgcttattcatttatccatcaaagaaaaccaatagcttttttacataccagtaacctggttaaaaaaaataagatggaaaaataccaagcccaaaaatgtcaaattgttgaacaccagagaggtactataattcaagctgagcagaaaggaatggcccttgtctcagccctgagccacatgtcactacatgggccccaagcagctcttcttgtgctcagagtcctgctaagtcttgttctgcactcctctaaagtggctcaaactagcacaggaggccaggagggagcagattctatgccacctccattgcttctgcgccttctccagatccattttttccaaaagctgtgtttgaattctgcacaggggcaggggcatctctgtctccaacactgaaaccccttttaccagacccagagaagactgcctttttttttttttttttttttttttagacggggcctcgttctgtcgcctaagctggagtgcagtggcaccatctcggctcacggcaaactctgcctcctgggctcaagcaattctcctgcctcagccacctgaatagctgggattacaggtgcgggccaccacctccagctaattttgtatttttagaggtggggttttgccatgttacccaggctggtttagaacttctgagctcaggtgatccacccgccttggcctcccaaagtgctgggattacaggcatgagccacctaacccggccagatttaactgctttgaaccaccatctcacacatcttccaggggcttctagttaaatacagagtattaatagtgtataattccatttatgtaagatccttggaatagccaaactcacagagacaaaaagtagaatggtggttgccgggggatggtagaggggaaaattgggagtcatttaacgagtatggagtttcagtttaggaagatgaaaaaagttctggagatggatagttgtgatggctgcacaacaatatgaatgtacttaatgtcggtgaaccgtataaccatttaacaattgaaaatggttataaaggtcaattttgtgttatgcatatcttatcacataaaaaatacagaggactgatcattatatttgctcccttccaaaatcccacctaggttaaagaaaaatatataaacccacaagaacacagggaccaggagaggagatgcattcattggattaggtttggttgtaaaacaaaaacaaaaacaacaaaaacaaaaaaaaacacctgggcgcgatggctcacaccttgtaatcccagcactttgggaggctgaggcaggcagatcacaaggtcaggagttcgagaccagcctgaccaacatagtaaaacctcatctctactaagaatataaaaaccagccaggtgtggtggcatatgcctgtaatcccagctactgaagttggctgagacaggagaatcacttgaaccagggaggcagaggttgcagtgagctgagatcgtgtcactgcactccagactagatgacagagcaagactccgtctcaaatggaaacaaaaactaatataacagtgactttacatgctatgggttttttttctcctctcatcttcaagaaatgcggagacggccagtccagggatgatacagcatcacagtgtcaggaatctgctctttctgtataattgttacaggaaaggggtcccgatccagaccccaagagagggttcttgaattcaggccaagtccacagtgcaaagtaaaagcaagtttattaagaaaggaataaaaattccctactccatagacagagctgcccggagggctgctggttgcccatttttatggttatttcttgatgatatgctaaacaaggggtggattatttatgcctcccctttttagaccatatagggtaacttcctgatattgccgtggcattcgcaaactgtcatggtgctggtgggagcgtagcactgaggaggaccagaagtcactcttgtgtggcctttttggtttggtgggttttggccagctcctttactgtaacctgttttaacagcaaggactttatgacctgtattttatgttgaccttgtatctcatcctgtgacttagaatgccttaaccatctgggaatacagcccagtaggtttcaacctcattttacccagctcctattcaagatggagttgcggcccggcgcggtggttcatgcctgtaatcccagaactttgggaggttgaggtgggtggatcacgaggtcaagagttcaagaccagcctggtcaacatggcaaaaccccgtctctaccaaaaatacaaaaattagccgggcgtggttggcgtgtgcctgttatgccagctacttgggaggctgatgcaggagaatcacttgaacccaggaggcagtggaggttgcagtgagcagagatcgcgccatgcactccagcctggacgacagagcaagactgcgtcttggggaggaaaaagaagaaaagatggagttgctctggtttacattcctctgacataatggctttatgtacatggcttccatggttaaggtcagctcgtggatctgatatggctgtgttggtgatcatgcccagcaatcagaaagagaagggaggccgggtttggtggctcatatctgtcatcccagcacttcgggaggccaaggcaggaggatcacatgagcccatgagtttgagaccagcttgagcaacatagggagacctcatctctacaagatataaaaaaaactgtcggacatggtggcgtgtacctgtggtcccagatattcaggaggttgaggtgagaggatacctggaacctggaggtttgaggctgcagtgagctataatcgcgccactgcactccagcctgagcaacagagtgagaccccatctcaaacaattaaaaaaaaaaaaaggagggcagaaaaagtctatgtaccttttctttcaggttaccttctcaaagttgtgcataccccttccatttacattatattggccagagcttaacatgacaactactagctacaaggtggtttttattctgggttgccatgcatcttagcttgagtaccctacaggcagatcctgagacgaggattcctgtgaaaatgattatttacttatttaattaatttattttgagatggagtctcactctgtcacccaggctggagatcagtggcatgatctcggctcactgcaacctctgcctcccaggttcaagcaattctcctgcctcagtctcccaaatagctgggactacaggcatgtgccaccatgcccggctatttttttttttttttttttgtatttttagtagagacagggtttcactatgttggccaggctgatctcaaactcctgacctcaggtgatctgcccgcctcggcctcccaaagtgctgggattacaggcgtgaaacactgcgcctggccgaaaatgattttttaaaagtgttccaggaagaaacggaaagggcataggggagtaagaaagtggaaaatggaaaggaaggaagccaagcaaggggatcctatcaagcaaagcctcagtcctgcagacagtttggaggcaggatattcacatcttagagttgtccaaaacaggacaggcaagctgcagaattttcaactctggctgaataaggttgcgtttcagctctccgggcacctggaaagtatgggctccagtagcctggaggcagtctgctgacagacacaggtgctggctggtgtgcacaaaagtggtaaagggatgagcgggtgcaatagggacactggcatcttggctgtcatgcatccaggtaaaaagtgggggctcaattactatatatgaaagggagaacagactttaaggaataattatcagtcatttccaggtgagacagcaacagaagagaaatgctaaattttcccttttttgggggggtgcggtggggggacagagtttcgctcttgttgcccaggctggagtgcaatggtgcactctccggctcactgcgacctccacctcctgggttcaagcgattctcctgcctcagcctcctgagcagctgggattacaggcatgcaccaccatacccagctaattttgtatttttagtagagacagagtttctccatgttggtcagagtggtctcaaactcccaacctcaggtgatccgcccgccttggcctcccaaagtgctgggattacaggcatgagccaccgcgcccagcgagagatgctaacatttttttgttttttggaagatgacaagttgatgcaagaatgagcagaaccaggaagctggatactcagtgtttaagagttcctagcaatatgcaggaaaggaaagcaacaagtatcccgggaggtggggttagatgtagactgaaatcaggaggtgtggttaaaactctttgaaagaggctgggtgtggtggctcatgtaattccagcactttgggaggccaaggcaggtgatgacgaggtcaggagttcgagaccagcctgaccaacatgtgaaaccccatctctactaaaaatacaaaaatcagccaggcgtggtggcgcatgcctgtgatcccagctactaaggaggttaagacagaagaattgcttgaacctgggaggggaaggttgcagtgagccaagatcatgccattggactccagcctgggcgacagagagagactccatctcaaaaaagaaagaaagaaaaaagaaacagcagattccctagagaggagacattcatcactaaaaaaaaatatatatatatatatatagagagagagagagagttaaaataattcgcagaactaaaagacctttttgaatgggctcagggtgcccagcataatgtacgaaacaaaagcaaacccacatcaaagtacaccattattaatttcagagcatcagaaataaagagaagatctgataagcttcttggaagaaaacaaggcacagagaataatcagaggagagtagagcaggaaaacagggtcctgggtagagagaactgagtctagccaattgatagaattcttgatgttttgttgaaaacagaagcactttataattctctgggtaagttttagaaagattctgtagtaatggtaaattgtgcaaatttaaaaaatggaacctgttaatttcaggaagaacaaaaggtagaaaaggcaatataatcttggtacaacatttgactcagctgcaatgaataagacttacatagtcatataaggtaagcattgattacttactttaccaataattatgatatcaccatactgaaagcccagaagcaagggaaataaagggaaataccagagtgctaaatctttttttttccgtaagttggtaatgtataaaataataaaatgacaatcataagcctaatgcttagaaattcagaaaaatatcagactaaattttaaagtctactttaaaactgagtttttgctttatagtttcataaataaattcattttgatggttttctcagaacagatgaactggctgagtaaagtggttcatgcctgtaaccctatcactttgggaggccaaggcggatggatcacttgaggtcaggagttccagaccagccaaaaaattagctgggcacagtggtgcacacttgtaatcccagctactcagtaggctaaggcaggagaatcacttgaacctggaaggcgaaggttgcagtgagctgaaattgaacaactgcactccagcccgggcgacagagtgagactccatctcaaaacaaaaaacaaaaaacagatgaattgtttttccttaaggaatactgatgatcccactgcttgagtaatggaaagcagcttgcagctaataagttattttttgtcttttttcctgttctatccattgtcctgggtttgaaatttcagctgggcagctttgatcccaccacctgtagccactgaggttcataggctgtttgagatattatgttcaattgtgctgggtttgttttgctgcttaatgagtgatgaagagcaatgtattcgctactgagatattctgcagaaaaaggaagagatgtcttcagctcaaatgctatcaaacttgtatgtcttttaactttttattataaaaatttcaaacatatgcaaaagcaaaagacttgttcaatgaaccttatgtacccaccacccagcttcaacaattatcagttcctgacaattcttgtttcacctaccccacctctattatacacacatacaaacacacacacagacacacacacacgggagcaaagtcaacttccattattttgaagcacatccaagacatcacatcgcattatttatcacattatttattaagtttcttgggtcatagtctatctcacagaaagaaatcccccatgagaaacttttaggacatagcttttatgttaattacttaatttctgcactagccatccttgccttccttctaattttctgcactagctatccttaccttccttctaatttactaacctgccaaggattctcctgcctcaaagtatttgcatcagctgtttctttctgcctggattgctctttcccagatacttacatgtctcattctttttcacccaggtgaaataaacagccttgttgctcacacaaagcctgtttggtggtctcttcacatggatgtgtgtgacatttggtgccgacaacctgacaggaggactcctctgggagaccggtcccctgtcctcgccctcactccatgaggagatccacttgcgaccttgggtcctcagaccaaccagcccaaggaacagctcatgaatttcaaatcaggtaagcggtcttttccagcctctcttgctacccttcagtctccctgtccttccaattccagttctttttcctctctagtagagacaacagagacacattttatccatggacccaaaactctggcgctggtcacagactcgggaagacagtcttcccttggtgtttaatcactgtggggacacctgcctgatttttcgctcacactccattggtgactgatcatcggggggcacctgccttggtcattcacccacattcccttggtggcaagtcaattgcggggacgcctgctttggctgctcacccacccccttttctgtgtctctacctttctctttaaacttacctccttcactatgggcaaccttccgcccgccattcccccttcttctcccttagcctgtgttctcaagaacttaaaacctcttcaactcacacctgacctaaaacttaaaagtcttattttcttctgcaatactgcttgaccctaatacaaactcgacagtagttccaagtggccagagaatggcacgttcaatttgtctgtcctacaggatctagataatttttgttgaaaaatgggcaaatggtctaaggtgcctgacgtccacacattcttttacacattggtccctccctagtctctgctcccaatgtgactcgttccgaatctttcttctttctctcctgtctcttccttcagtctccaccccaagctctgagtcctttgcgtcctccttttctacagattcatctgacctctcccctcttccccaggctgctcctcgctaggctgacccaggtcccaattcttcctcagtctccactcccccaccctataatccttttatcaccccctcctaacatcccatctggcttacagtttctttccttgactagccctcccccacttgcccaacaatttcctcttaaagaggtggctggagctgaaggcatagccaaggttaatgctcctttttctttatccgacctctcccaaatcagttagcgtttagactctttttcatcaaatataaaaactcaaccctgttcatggcctgtttggcaacaacccttagatgctttaccaccctagacccagaagggccagaaggccgtcttattctcaacatgcattttattacccaacccactcccgacattagaaaaagctccaaaaaattagattctggccctcaatccccacaacatgacttaattaaccttgccttcaaggtgtacaataacagagtagaggcagccaagtagcaacatatttctgagttgcaattccttgcctccactgtgagacaaaccccagccacatctccagcacacaagaccttccaaatgcctgaaccgcagtggtcaggcattcctccaggaccgcctaccccaggatcttgcttcaagtgccagaaatctggccactgggccaaggaatgcccgcagcccaggattcctcctaagccatgtcccatctgtgcaggactccagtggaaatcggactgtccaacctggcagatactcccagagcccctggaactttggcccaaggctctctgactgactctttcccagatcttctcggcttagcagctgaagaccgacactgctcgattgcctcagaagccccctggaccatcacagatgctgagctttgggtaactcttacagtggagggtaagtccatcccctgtttaactgatatgggggctacccactccacattaccttctctttaagggcctgtttcccttgcctccataactgttgtgggtattgacagccaagcttcaaaaccctttaaaactcccccactctggtgccaacttggacaacattcttttatgcactcttttttagttatccccacatgcccagttcccttattaggctgagacattttaacctagttatctgcttccctgattattcctggactacagccacatctcattgccaaccttcttcccaacccaaagcctcctttgcgtcttcctctcttatcccaccttaacccacaatgggacacctccactccctccctggcaactgatcaaacacccattactatcccattaaaacctaatcacccttacccggctcaacgccagtatcccatcccacaacaggctttaaggggattgaagtctgttatcactcgcctgctacagcacgggcttctaaaacctataaactcttcttaaaattctcccattttacctgttcaaaaaccagacaagtcttacaggttaattcaggatctgggccttatcaaccaaattgttttgcctatccaccctgtggtgcccaaccccgtacactcttttgtcctcagtaccttcctccacaactcactattccattcttgatcttaaagatgcttttttcactattcccctacaccccttgtcccagcctctctttgcttttacctgaactgaccctgacacccatcagtctcagcagcttacctgggctgtactgccacaaggcttcagggacagccctcattacttcagccaagctctttctcatgatttactttccactccttcgcttctcaccttattcaatatagtgatgacgttcaactttgtagcccctcctttgaatcttctcaacaaaacaccctcctgctccttcaacatttattctccaagggatataaggtatctccctccaaagctcaaatttcttctccatccgttacctacctcggcataattcttcataaaaacatacatgctgtccctgcctatcatgtccaactgatctctcaaaccccaaccccttctacaaaacaacaactcctttccttcctgggcatggttggatatttttgcctttggaaacctggttgtgccatcctaacaaaaccattatataaactcacagaagcaaacctagctgaccccataaatcctatgtcctttccccacttccctttccattccttaaaaaacagccctaaaagctgctcccacactagttctccctaactcatcccaactcttttttcattacacacagccgaagtgcagggctgtgtggtcggaattcttacacaagagccaggactgtgccttgtagtctttctgtccaaacaacttgaccttactgttttaggctagcccccacattattcctgataccacacctgatccccatgactgtatctctctaatccacctggcattcactccatttccccgtatttccttctttcctgttcctcaccctgatcacacttggtttactgatggcaggcctaattgccattcaccagcaaaggcaggctatgctatagtagtatcttccacatctatccttgaggctaccgctctgcccccctccactgcctctcagcaagccgaactcattgccttaactcaagccctcactcgtgcaaaaggactacctgtcaatataaactgactctaaatatgccttccatatcctgcaccacaatgctgttatatgggcagaaagaggtttcctcactacgcaagggtcctccatcattaatgcctctttaataaaaactcttctcaaggctgctttacttccaaaggaagctggagtcgttcactacaggggccatcaaaaggcatcagatcctattgctctgggcaacgcttatgctgataaggcagctaaagcagcagctagcgttccaacttctgtccctcatggccagtttttctccttctcatcagtcactcccacctactcacagactgaaacttccacctatcaatctcttcccacataacgcaaatggttcttagaccaaggaaaatatctccttccaacctcactggcccattctattctattgtcgtttcataacctcttccatgtacgttaaaagctgctagcccgtctcttagaacctctcatttcctttccaacgtggaaatctatcctcaaggaaatcacttctcagtgttccatctgctgttctactactcctcagggattattcaggccccctgccttccctacacatcaagctcggggatttgcccctgcccaggactggcaaattgactttactcacatgtcccgagtcaggaaactaaaatacctcttggtctgggtagacactttcacttgatgagtagaggcctttcccacagggtctgagaaggccacgtggtcatttcttcccttctgtcagacataattcctcagtttggccttcccacctctatacagtccaataatggaccagcctttactagtcaaatcgcccaagcagtttctcaggctcttggtattcagtggaaacttcataccccttactgtcctcaatcatcaggaaacgtagaacggactaatggtcttttaaagacacacctcaccaagctcagcctccaactttaaaaggactggacagtatttttacctcttgcccttctcagaattagagcctgtcctcaagatgttacagggtacagtcgatttgaacttttaaatggatgcagtttcttgctcggccccaaccttgtcccagacaccagccctctaggtgacaatcttctagtcctcc

SEQ ID NO: 3 - DNA, 39346 bp, mmusculus
ggcggaccggggctgaggggtggggccgggggcggagctgctggagggggctgctccgcgccggggccgttggctccagacaaataaacatggagtccatcttccacgagaaagtgagtgtgggcgttcggtggggagccgtcctcggctcggcggcgggcgtggggagcagcgacgccgcttcaggaactcaggcggggcccgagcgcccccatcccgacctggctgggtgaggggtgcttcctgccttctccccatggctccgctcgtgaagcctcccgcatgcgttcccggcaccctcgccctagaagaccgggcgggtagcctgggcatttcggggggcttcacccggaggattagcgcgggcgttccttgtccacttgccacaccttttcgggtttcttctctcttctctcttagggtctagtctagcgagtcgccttttcagcacctggcggacccttcccaactccacccacgccccctaacctgtcctctggcagatccaactttctctctcaactcagttctataatggaatgctccatgcatttagatcttgattatccatcccacgtctttctgcagttgtgaccgtggctttcccattaaagggcctgacacttcggaagtaaagtaggaaaccccggagggaagtcgtcataagagtttttattacggggatgtttgggttgttctcccatttttccggaccaggaggccagctttgtttttaggtattatggatagattagaatcgttctactgtgtgatttggcttagtctcttcctcaccttaattcctaagtgactacgcttaaaagtattgctgtgacatcttgagaaactggtctatgttcgcatacaattatcaagtcatttgggtgtttctcggacaaccatgtttcataatcattttaggtttggagagggttgctagttgagactattatttcgttgggagcaaaggcctttgtttttatcacttgtaaaggagcattgactcatagtgtttaaaatccacgcacaacaaaaagacaaaaatgatgtgaatctaaggacgttgttaaatgaagtgctcttaagaagacattttgagtgttttggaactggaacaagttagtttgtgacaggatttcttgtagcccaagttggctccagactcccatcgtcctgtctctgcctcctgagagctggctgggatgatggccacgtgctatgactgagtgagctccccctcccggccccctccccacattcatttgtaattaattttccaaaggttttggaataagacccattttaaacatgttatattttgaacactgtatacactgcttcatgagactcttgccattcattctatttaaaaaaaaaagttactgtttgtgtgtatgtgctggtgtggaggtcagggaggactttataaagttctctcttcccaacttggtgtgagttccgggtgtctcaggctcttagcaagcccgtttactcactgagtcatctctagggtgaatgaaaaaagaaatgggaaggacatgacttttcctagggatggcggaggagaaggtttattaaagagatttgggagagcagagccaggggcagacatatttgggagaacccagagtggtcttgaccctgaggggaagggagaaaagggaaggaaatacagcagccaggagccaaagttgcaaaccatacaaaaagagggtgggtaaccaaaatgtatggattacataggcaagagccactaggggaagggcagcatagtccatgctctggagagttcagggtagagggccgggtataccagccataccctgtaacaggagggactaagggatgctgggacaacctggaggccaggtccacttccatatgttaaataggtacctcagccactaagcctgggattaaaacttaacatagggcacttaaacaatgcattaaaaaattatttttggccagcaatggtggtatacctgtttttgatattttatttatttacattttatttatttattttggtttttcgagacagggtttctctgtatacccttggctgtcctggaactcactttgtagatcaggctggcttcggactcagaaatccgcctgcctctgcctcctgagttctgggatcaaaggtgcacgctaccacgcccagctatttacattttaaatgttatcccattttctggttcctctctacaaactcccaatcccatccccccccaccctctgcttctatgagagtacttccccccaccactcccgcctacccgctctggcattcccctacactggggcatcaggccttcacaggaccaagggcctctcctcccattgatgccctacaaggccatcctctgctacagctggagccatgggtcgctccatgtgtactctttggttgatggtttagtccttgggagctctgggtgtgggtgtggggtctggttggttcatattgttgttcttcctatggggctgcagaccccttcagcttcttcagtcctttctctagctcctccactggggactctgtgctcagtccaatggttggctgtgagcatctgcttctgtatttgtcaggcacagagagagttttaagatagccagggctatccagagaaactctgccattaaaatccaaaaaaaaaaaaaaaaaaaaaaaggtgtttgccagggtactgtgtgctcctagtgcccactaaagccagaagatctggaactggaggaactggagttaaagaggccacgtgagcagccacgtgggtgtgaggaattgaacccaggtcctctggaaaagcagccaatactctttgttttgttttgttttttgagacagggtttctctgtatagccctgcctgtcctggaactcactctgtagaccaggctggcctcaaactcagaaatctgcctgcctctgcctcccaagtgctgggattaaaggtgtgcgccaccaccgccgggctagcagcgaggactcttaactgctgagccatctctccatctcccccaataccttcttgacagtactgtttctcattggagcagatttcagtggaggtgactactgaattggtatatgcaaaatgctaggcttacaaagtgcttgtgagtaagcatggaagcccgagttcagatcccagtgtgtgttgtattcaccaatactcgaggcagggaatggacagacaagtgggtttctgggtgctgccccgtcagtcagtccagctgaatggtgagcactagactccactagaaaggtggagagcagctgaggaggacatctgacttagacctttagcacatgtatgaatacatctgcatgtacacatatacacaagaacacatatgcagacatgagtgcacagatacacatctgcttacccagaagtcattcagttatcagcaggtgtatatacttaataaatacttgagaagtacctttgccgtgtgtgtgtgtgtgtgtgtgtgtgtgtgtgtgtgtgtgtatgtgtatgggggtgcacatgtgcatatgcatttagaggcaggaagacaacattggtggtgttcctcacaagtaggttaacttaggacttccaggtatctgcccatttttacctctccagcgctatagttacagatgggtaccgccatgcatggctttttacatgaaggttctggggattaagctcagatcctaaggccagtatggcaagcaccttattgattgactaagctcagatcctaaggctagtatggcaagcaccttattgattgactaagctcagatcctgaggccagtatggcaagcaccttactgattgactaagctcagatcctgaggccagtatggcaagcaccttattgattgactaagctcagatcctaaggccagtatggcaagcaccttattgattgactaagctcagatcctaaggccagtatggcaagcaccttattgattgactaagctcagctcctaaggccagtatggcaagcaccttattgattgactaagctcagatcctaaggccagtatggcaagcaccttattaattgactaagctcagatcctaaggccagtatggcaagcaccttattgattgactaagctcagatcctaaggccagtatggcaagcaccttattgattgattaagctcagctcctaaggccagtatggcaagcaccttattgattgactaagctcagatcctaaggccagtatggcaagcaccttattgattgactaagctcagatcctaaggccagtatggcaagcaccttattgattgactaagctcagctcctaaggccagtatggcaagcaccttattgattgattaagctcagctcctaaggccagtatggcaagcaccttattgattgactaagctcagatcctaaggccagtatggcaagcaccttattgacagaggcatctccccaatcctggagacttcatttgcctttgtcattaatttaactgtatgaagcaagtgaacacttaatgaagtcatagcatatttcttttttcttttttttagatttctttttttaagcatttattactatatataagtacactgtagctgtcttcagacacaccagaggagcatcagatgtcattacggatggttgtgagccaccatgtgggtgctgggatttgaacccaggatctccagaagagcagttggagctcttaactgctgagccatctctccagcccgccatagcatatttcaagagaatgtacctgtgactgtagaagagaccagactgggaatatttaacataattgctattttccagagaattcttttcccttccataacttgcctttaaccagtaaattaactagagaagatatcaaccactttctcatggagttaattttacacttaacccctttgaatgcttccttttaaattagacataaaagcagttgtcagccaggcatgatagcatatgcctttaatcctagtacttgggaggcagaggcaagcaggctccttttgtgatttttttttagattatttggaagagtggaagtgtagtgtgttcatcttctgagcctagcacagtaaaatgtggattccccaactcatagaattttaatagcaaagagagtttctcttgtgtgaaatagaaaagtgttttattatattgtatcgcatatgtatgtaggggttctccatgcatgccactgtgtacatacggaggtcaaaggacgggttgcaggggttggtcctctcctcccactgtgcgggtccttaggtctgcatggtcacagccttttggttcgtgtagaatttttttttcccccgagacagggtttctctgtgtagccctggctgccctggaactcactctgtagaccaggctggccttgaactcagaaatccgcctgcctctgcctcccgagtgctgggattaaaggcgtgcgccatcacacccggcttcgagtagaatttgacagcctgtggctctatgatttttaaattgacttgaacaatttgttgtttccgtccattaatcatatcagaagcagtaccattttacttggtcagggcttcattttaagtgcttatttttcataataaaaaagctacttgttttagagactgaatgtagcacatttggtagagtgcttgccttgcgtgaataaagcttaaattctatccattcccaatacacatgaattgggcataatgagataggtacttttgatttttttaaagatttaattatttttatgtgtatgagtatcttcatgaatcaagtgcaccatgcgcagacagtgactgaggaagccaggagagggtgccagatcctttaggactgcagttactaactagtcatgagcccctctgtagattctggggacagaacccaggtcctttgcaaggatatcaagtgttcttaactccatctctccagcctccaaattccaattattaataacaagaatgttttatcaaaacactggatgccattatttctgtatgttaaagctggtgaccaggagctcagtggttataagcactggctgctgtggacccagggtccccagcacccatctgatgacttaaaactgtctgcaactccagtcttagaaggtccagcatcgtcttttggccttcgtagacactaggcatgtacatggtgcagacacacatacaagcaaaacacctatacacataaaaaccatagtttatgacccccacactgaagcatattgcctagcaataggactgaggagtcatcatagctggtccccaagttgagtgcctggttaccatgttagatagttgttgatttccttctttctttctttctttctttctttcttttttttttttttttgtctttttttcaagacagcgtttctctgtatagccctggctgtcgtggaactcactctgtagaccaggctgtcctcgaactcagaaatccacctgcctctgcctcccaagtgctgggattaaaggcgtgcgccaccaccgcccggttgttgatttgagacaaggtctcactatgtaggtaacaggccaggaactcacaggagtattcttgcctctgcttcctgagtactgggattaaagttgttactgccatgcccggccctcttctttgaatgttttaaatcaagcatttcacatacaagaacacacaaattatgagaatgtgcagttgagggagcacacatggaaacagcccttgggtgaagtcacagactgtttccctgaatcctcgacaccccctgtcctttcttccagctcttcctcagtgcttacttctacaagaaaaatctgacttcctagactgagattaatttcccctatttaaagcttttgtaaaaaaaccatgtaagtctttaactccggcatttgggaggcagagccaggtggatctctgagttcgaggccagcttagtctacagagtgagttccaggttagctaggctccacagagggaggttgggggaaaagaaaaaagaaaagaaaaggaaaaaaacatggcatgcacttaaattttttactactgtgtatctctgcttgatatgttgtatgagtggacacatacaccaaagttctgtatagagatcaaaggggagctttgtggaattcccttccactttggagtcagttccaggcataggactcaggtcttccctagggtcctctcatccaccccatcctgcactttaactgtctttgattggtgatagttttggggattgaacccaggtccttgtacagactagctccatccttagctctggtgtctactcttttgagtgttgtgtgttttttactttttaacagtgtttgagagattcatccatattgttatagttgtgtttaatttacttttattcttatagtgttcttttgttattgtaattctgtgttcaaactgtctttgggtgctttccagtttggaaagcctgtaagtagtgctgtagtgagtgcatcggcagtgtgtctaatcacagcacacagcgttaagctttggtaacgactgaggattgttgtagagttggttcactactttatactcgctcctgtaacgatggctttctgtcattctaagcctcccactgtaatagctgttttggagactgtagcagtaacaccatgtgagtgtttcttttgtaaaagtacttttttttcttagctaggtgtggtggttgtattattagtcagggttctctagagtcacaaaacttacggaatatccttttatgttgagggattttattgtaatgacttacagtctgtagtccaactaacccaacagtggtcagctgtgaatggaagtccaagaatctagtagttgctcagtcccacgatgctagttgtttcagctggtcttctgtagaagtagattccaacagatgtgctgactagtaagtgcaagcaggcatagaagaatgaaacttccttttaatgtccttaggtaggccttctgcagaaggtgtggcccagattaaaggtgtgtaacacctgcctagatctgggacttactttgtctcaggctgaccttgaactcagagatcttccctcagtctcctggggttaaaggcaagtattaccgtgcctgaccactatgcctcaagatctccatgtcaagatccaggtcagaaacttgtgtcttttggcctcaagatctggatcacaggttagccctccaattctgaattgtaactcatttcagatatagtcaagttgacaaccaggaataaccattacggtggtgtgcacctttaatcggagcactcagagtcagaagcaaacagatttatctgaatttgaggccatcgtggtttacatagtgagttccaggctagctagagctacttattgagaccttgtctcaaaaccaagtgagtgcaggcctacacgtggctaggtgtgcatgtggggacaggtactcaggagccagctctgtctttctacagtagtattggggattgacagcaggccctgttacctgctgagccatcttctgttgtagtttggtatacatttccctgatgactaatgaagttgagcatctttttgtatctcttagccactagactatcttgtgaaatgattacatttccactagaatataagtagaacatctgtctgtccttacctcatagtaattggtattcagtggaagttgcttctagtaaatcaacattaaaggaggcaaagaattctgaggataagttgttctagctctctgtcagactcaagctctctgaactctcccttcctggtccatagcagacaggtatgctatatctacttcagcaattacattttgtttctgtaggagtgatacattggtgtgtgtgtgtgtgtttggggggatgcatcttgcaggtgctctctggagtcatcatctgccatgtaacatagctcaggccagggggcatgttgtcaggcaggttgagttcagtaggcctcactggccctttagagggccagagttaacagaaggaagtgttttcccatctgcctttgccttccgaaaggcagagttagggtctgtgtccacaggactcatctactcatgtgtctcgttctttggaaagcaatactgttggtccaggagaatgacaagcaagctgcccactatcaggcagtctggatatagagctggactgggtgccagttgtgtatgaaaggcagctagccagtgcaagaagcccctggacctatgggacattgtgtccacccgtcatggggaggatgttaatgaccccttagggagctgaagttggctgcagttcctcttactgctgtctactcgtggacatggacttggggctgttgagagcctctgctctagaactgtgggccttaacttaaagtgagacaggattgttctcgcttacccagttcttgaatttgaaaggacaggcttttaaggtcaaacagcaaccatcttgtcacaagaatgaatgttctagaggtttatgctccctttttgcagtagtaatttgctgtggaatttctaaaggtaaattctaataggtactgaaaaattcaaagggtaaatgtttttataggttaatttttaggtttatgtgattggatagatgaattatactgtaaaccgttcttcatttttgttcctaaagtagctgtagaatatacatgggcaaggaaaatgtatgtgcttgtgaaatctggtttgcatggggcttacaaagtttgttttgactgccttaaaaagttagtaattacattttttaggagatattgtacagatcggcttgatgacatttgaatgttttcttttggaaacactagcaagaaggctcactttgtgctcagcattgcctgaataacctattgcaaggagagtattttagccctgtggagctatcctcaattgcacaccagctggatgaagaggagaggctgagaatggcagaagggggagtcactagtgaagactaccgcacatttttacaggtactgattttcgactcactgagccccattttattgtggaaatgcgggtgctctttagaggaggatgagccgttctcccccaggagtctgactcggtaattatcactctgctcctcctcacttgggaaatggggttgtacagcgtgttcttttaaacgtgcacactaattttaacccttttcccatccccctctgcccacaactactgcccatgaaaattgaacagcagccttctggaaatatggatgacagcggctttttctctattcaagtaagtagtccagagtgcagcgctgcctcatttccagccccgctttgtcctgaggctcagttgtggttgatgtgccacagtgtgccacagctctttatgtaacgatggaggcttctgcagctccttctgtaaactgtctgcagaagataagacactgcagagtgctacacgtacagagatgaccacaggacagtagactcttcactttagaacggctttgactgctcacatgcttaggacaggcaggcccttgctgcctatacagtcctcgctggtctgagacttgtgatcgtcttcccctctgtgtctccagactgaaattataggtgtgtgctaccacagtcagtttagagtggggcttttaaaaattactttctaagagagattgcttaatttgcatgtaggtgctaataactctaataaatttcagtgcttcaaactccccatctctggcatgtctgagaaattgcagtgtcttgcagtcttctatttaaatcatcctccaggattggattcctgttgggtaggttgtagccctctgaaggctggtatggagattgccctcaaggccttgcatgtgccgagctcaaactgaccccgagccacatcccagtactttacgttctatttatctgtgttggtttattctttttagtgctggggatgatatctaagacaatattctgctctagagaaaatctccagccctgtggttatacatacatacatacatacatacatacatacatgcatgcatatacgtgtgtgtgtctgtgtctgtccttctgtagcctagcatggcatggccttgaacaaagccctgctgcggcatcccagttgttggggttgaagtctgggcacggatgcctgacttcgtttgtgtacttgtgaagtccattctgacaatgtgagcgttgtccaaattctttctgaatctgtcttttgagagatctacttatgcaagtgtctttctttatactttccttctatgccacccttctagagtcctcattctctagcatttccacccagtacttcacttgtgacattgtgaggcccagtgggcttgtgctgagagtacaggtgagagccagcagtctcctgtggtgtcctgtgtggcactgcttccatctctgctctctcgcacttgcagttggtctgagttgtacatgtttctttgttgacttcctgggataacaggtggaatgttgtcttaatttctctctttttttttttcagcttgctatcatcaggtttgattttctgttcatggaagtttaaaatacatcaaaccttctttttaaagatttatgtgcccatgtgtggatatgtgcacatgagtgctggtgtctgtggaggacagaagagggcactggaaccctgcagttgacattacaggctgttgggagccctgacgtgggtgctgggaactgagcttgggttctgtaagagcagtgtatactgttgaccacagtcatctccccagtgcccagacctttcttttcaacccccagggagaatttatttactatacacctttggtgactgccattgcaggtagtaagtgtaggaagggatagttttacaaacagcacccacagtgtggcgtgcttctggatgtgtgagacagtgttatctacaaattctctgcttttctgacattcctcagaatggaaaagctctctttcaaaatggatgtgaggggctggagagatggcttccgtttaagaatgcttaatggtatttcagaagaagaccggctcagttcccagcatgtacgatagactgcttacaactgcctgtagctcctacatggacacctgatgccgtctggcctccacaggcactcagacacacttagataaaaaataataaaacaatacatctttaaaacttgcaatgaaataaaattaagttcacatgtatatattatttatggatttagtggggtgtcaagggaacataatttgtaaaagctatatcctcaaactatatatgaagaatagttgcttatagtagctgtgctacttaaacttggacttgaaggtttagctcatgaaaagttgttatttttcttttgacaggttataagcaatgctttgaaagtttggggtttagaactaatcctgttcaacagtccagagtaccagaggctcagaattgatcctatgtaagattttttcctatatttctttatttagatttgatttttaaagctgtaatttctgaatgaggacaaaatcatcatgaatgtctttgctttattctgtatttgatgcccttagacttcaccccgtcacctttttggtgcctttcttcagtgtcagtggtggccctgccctgagtcctgtgggggctttgtgcttagcatcactaagctcctatgggagacgcatagtgatgcgacttttattttttcaaataagtaattaagtattaataagtaattaagtatgtcattaagtaaatgataggagatacttgctagtacatctctactatcccaacttaacagtatatgttttgttttcttctagaaacgaaagatcctttatatgcaattataaagaacactggtttacagttagaaaattaggcaagcaggtaatatatcttctattttcttgtccttttatcataatctgtactctgtttgaaactaaaatttgatattggtctctttggaatgtatcctaggattctgtgcactctacccaagtctggactcaatttaacagataaaaatttcctagcttaagagaagataatcatcttctcttcagatttttaaaaataaacctatatatgttatgtcataatgaaaattttgtagtaaaaacagtgcatatgtggttaccgttacatatgtttttgtgtgacgatttgtgtttagcatagtactacaacaaagcctgagatcatggtgggaatgcgcattacgggatgggcttctttaggcgattctagtgtctggcagtacttacatctgtgcacagttaccactgaacgtggctttaaactagtcacgtaaggccttactagaatgttagagcttgctaaaggttattgaaaaccagcttatatagtcaaagggaatgaactgctaatatactcgcagcgtggatgaatctcagaaatgggagctaagacctaatgacagaaagtagaccgactagtgcttgtgtagggctgaagttggagagaaggcacagagggacctggagacgggactctgatgagggtgctccagtctcggtcatgttgatgtgggtgatagagattctttgaaacgacaaactgtagaagtggaaatataattatgtgcagttttatcccagtgctgtggcccacacctttgacctaggaagaccttgagaccagcctggaccacataatgaaaccctcaagagagatgggggagcgggaaggcactttatgtgccctagtaaaactgttatttaaaataaaaagaaaggggctggagaaatggctcattggttaagagcactgactgctctccagaggtcctgagttcaattcccagcaaccacatggtggctcacaaccatctgtaatgggatccaatgccctcttctggtgtgtctgaggacagctacagtaaactcatataaattaagtaaatgacttaaaaaaaaaagaaatataaaagattattaaaaaatataaaaaaaaaatgtcgagtgtggtggtgcacatctttaatcccagcagagatctctgtgagctcaaccaaagcttcagagtgagaccctgtgtttaaaaatccaacaataaataagaaacagaacattgaacctggagatgtggctcagcgagtatgactttactgctctctcagaggacctgagtttggttcccagcacccacgtggtggcttataactgtctataactccagctctgtggaggaggtgcctttgggcaccaagcacacacatgatgcacatacatacatacatacatacacacacacacacacacacacacacacacacacaaaattaatatattaaaaagaaagaatacagtgagttaaatcaatatatattaattatatattatgtatatatatgtatattgatttaattcactgtgttctttctttctttctttctttctttctttctttctttctttctttctttctttctttctttctttctttctttctgttagcttttaattcagtcacctggaaggagccagtcttcagtgattgtttgctgatatagatcattggcagtgatatacttataataagcacaagaccctaagattccacctcttgctccagaacaataaggaaagagcaatctttaggttctttgtaagctgcatagggagccagttaagagcggtgtgtatagtaaggtagcttagctggaacaggaatcaattatgaaaggtccagggtcaacttcatttaacttctctgcccttctcccttgtagccactgagggtttatttgtgcctttagaaaattatgacccagggctggagaggtggctcagtggttaagagcgtggactgcttttccagaggttctaagttcaatttccagcaaccatatggtggcttacaacatctgtaatagggtctgatgccctcttctggtgtgaagacagctacagtgtactcatataacttaaataaatctttttaaaaagaaaaaagaaaattatcacccagcattattttcctgtatcaagtaatcactggagttttaaggtctggaaatttaaaacccataaaaacttagtagaaataggaaaacattgttttgaacttttacaatttttagctcatttttggattttttacattttgaactagttttagtttgtctttgacaggtacaaagatagcaagaatatgtatattgatccttgattctgattcctattcttgtttaagaacagagttttagctggatgtgatggcacgtctttaatcccagcactcaggagggcttggctgatctgtgagttctgagcccagcccctggtcctgtgtaaagaaaggaatgattggaaaggttctttggctggggtcagaatccaggaagagcccttagttgtgcatggagttgagcatgactttttgcatttttctgttttaagttagggcacctctgaggttgtgacttacctaatgctgttaatcacatgtagcaatagcttagaggtcttgttagaatgaagtgctcgtcataaattctctccgtagagtgtcttttagaaattggagtcttttggccaaaggaaaaagtgtgttgctgtcatttttttgtctgtcaatatggcaggagtctgtgtgttggcctgacagtgtaaaacctcttagttacagctatcaaaaagggcatcttaagatactgccagttgctctccttttagaagttcaggttcttgtttttagaaaagcatttaatagtgacaaatgttcagcttttttttttttttttttggtttttcaagacagggtttctctgtatagctctggctgtcctggaactcactctgtagaccaggctgtcctcgaactcagaaatccttctgcctctgcctcccgagtgctgggattaaaggcatgcgccaccgcgcccggcttcagccttttttttaaagtcatagtattcagtactttaaaaattctcagtttgatatatttctattatttctatagtcttattaaattttggtgggttatatgcataacatgggaaattctttttacatataatattcattaacttaaatactgatttttttttcctagtggtttaacttgaattctctgttgacgggtccagaattaatatcagatacatacctcgcactattcttggctcaattacagcaagaaggtaaataagatcaaaagtttgcttttaaactttaaaagtagcttaaatatagctgagtcatgaattgtgactacagaagcactggtctccgatttgtgagtgtgacggtactgatttctggctgtggtttgagtgacgcagttctatgtgagtgctccctacactgggacatcccctgagcctggggcttcctttccattcctaagtgctcttttgcttttccgtcctccccctcacagggctcacaggaggaggggcatgctcctctcattcctgttggctcattttcagtcactgttcacttggtagattggtgcctttgagtaaccacctggattcgccatgccttgtctgtgtaggcatctgtgagctgccatttttattggagagtttggatgtctagttatctgtctcttttccttaaattcttagtcatttccacaccagtaactattcctctttcaaagattgttttgttcactcttgtcttggcattgccaatgagtgtaactcccttcagattctagtcataagcatcgcagtctttgaccatcaccttctaccttcatgacagtttgctgttccgaccaggctctgaagttaccatgagatccagaactcctcttaaatgattcttcaaggtgttttgttttgttttgttaccatgagatccagaactcctcttatatgattcttcaaggtgttttgttttgtttttgtttttttgagacaaggtttctctatgtaaaagagccctggctatcctggaactcactttgtagaccaagctgccttgaactcggagacctgcctgcctctgcctcctgagtgctgggtttaaaggcacgcaccaccatgcctggtgattgttttctttttttaaagattttaaaaaatttattttatgtgataagatgtttgcctgcatgattctgtgtacactacaagcatgcagttctcaaaaaggccagaagagggttttgggagtcttggaaatggattcacagacagttgtgagtcaccacggtgggtgcttggactagaacctgggacctctgcaagagcagccagtgctcttagctctgagccatctctccagtccctgagcctgtgttcagttgcattcgctggcttctttcctcatctttcctaaataacaagaatcttgaccacaggtaaagtagctcgtgaccctagacgtttcctgtatcatagcagctgaacatggcttcaaacttaggtgaaatatgttggttataattttgtgcttacagctttcaaatgaccccttgatagttatttcacaacttagctctccatttgttacacattgctattctttctggctttctcttgtattcttctgagaacatagacatgattccctttctggtagcagatctctctctttgtttctgtagcttgtggtttgagcctattaaaataggtgggcgtggccctccgtgtaaggtcagcccttcaacatgtactgtatccctgtggctcctgttcagtcaacattcagtttttgtctaatgctctcctgggttgaacattctcccactcccttaaaaaaagtctatgcatgggtaaaaatccctttccctccccctccattgattaaaaataaagtgcttttggtaactatgaaactttagctgcttgcccatttaaattttttccagtagaattatctatagtgcattgtctattgaactcattccacttgggttgtgctgtaaaccactcatcttcaaaagtctctcttctcactatccgggtgacttctacattgccagtgccaggattcaattcttagatctcctagtctaaacagaacacaataaacttgttattaaaaaacaaacagggctggtgagatggctcagtgggtaagagcacctgactgctcttccgaaggtcctgagttcaaatcccagcaaccacatggtggctcacaaccatccgtaacgagatctggcgccctcttctggagtgtctgaagacagctacagtgtacttacatacaataaataaataaatctttaaaaaaaaaaaacaaaaaaaaaaacaaacaaacgaacaaacatcccaaactaaaaacagatataaaaggcgaggaagtgatgtgccttcctgtgcccttcccctcatggcctgttcctttataccttgtccacttaaggctctaaaagtaaattctgtttgtttgtttatttattaaaaactacacactggcactatgattatacctaaaagtgttgcactttctggtgatggggattggaaatcccagttgtgcgtatgtgatgcagagctccactctgctttgtatccccagctggctagccacagagctgtgatgtcacagatacacagctttaagttccgtatccctcacctctgatgatttctttcacacgttaatctgagttgaaatcaggttcaataattgtattgggttagttgtttgttttttttcctaaatcttcttataagtttccttgtctctgttttttgcctttgatgtatttgccagtgttttgtcagggggatattgggttgtttgcctgtttactgcatcttggtttttttcttgtgtattttctgactgctggatgctctatagtgcctggacctgagatgtaggtacttaaccatgctcaagctggtttgggaattgtcttagtcagggtttctatttctgcacaaacatcatgaccaagcagcaagttggggaggaaagggtttattcagcttacccttccatcaccaaaggaagtcaggactggaactcaagcaggtcaggaagcaggagctgatgcagaggccatggagggatgttctttactggcttgcttcccctggcttgctcagcttgctctcttatagaacccaggactacaagccagggatggtaccacccacaatgggcccgcccgccttgatcaccaaccaagataacacagtggccttacttgtgggcatctgcctgtctcaccagttgctgcttttgaggatcatccttctcttcccagtgtgtaacgttggggtgacctgggctcagttcagcttcttccttaggtgccatttcattgcttcaatcacagcctatgatctgtgctcccataattctcagaatttgttctttagcctagacatttcctttggaacacctttgtgtggcagctcaggaagatttcaaatcaaacaggtccacaaaagacatttaaaatgtttattttaatatttaacgcgtatgagtgttttatttatgtgtgtgcctggtccccatggaagccagaaaagggcatcatcggatcccttggaactggagttgcagatggttgtgggctgccatgcaagtgctaggaatcacatgtgaatcctctgcaagagcagcgagcgctgttaacctctgcaccatccctcagagtggcttacccactgagccatctcaccagccccacagagtacttttataaaaacaaaatgtatattatgccatacccttacattacctgttagtggtttcctcgaacactcaaaataaattccaaagttgtaaataaaatccagaattactatgctgtttgtataaggcaggatatcttctcaggacgtgttcactaggtaccatagtgagctggcatgctgattctaggatttagaaacagttttgttagcagaaaacagattaagacatctgaactctgattaagcttgttcttaaaaaatgttaaacatagccgggcgtggtagcgcacgcctttaatcccagcactggggaggcagaggcaggcggatttctgagttcaaggccagcctggtctacagagtgagttccaggacagccagggctacacagagaaaccctgtctcaaaaaacctaaaaaaaaaaaaatgttaaacatattctttttagtgagcagccttctcattctttgtttcattgaagtacaagaaaaatcaatagtagaaaatgtttttaaaaaattaaacttaattgtggttgagaaagcttagcttattaggtatgtatttattaaaagttgctttgtactagtgtattttttttttctttctaaaccacaaggcacacaaactagattagggtactggcttcccagctcctgtttttggttagaaggcatctatgtatggggcagtgagcagggtgccatttccagcatgttttccagtgatttgtccattttagcagtcactggacatactaaccaagtgtgtcttcacaccagccatgtgagggaggttcctttatcctccttcaacaaagggtgccagcagagatgggtgagatagttgacaaaaccctgtggcaccggcaggtggcagagctaggctaaaacgcaggcagtcaattccggatcctcctctttagactgtgttcaggctctgccctcctagggaccttgtagactgcctttgtttcttgtagcccctgaggcttcgagatgagaagagtgatcctgtgtgacttaccgtagattaccttcctaatccaagcgagagtcggcactaaatcaggtcttctgtttttcctactgtgctctttctgtcagctatcatttcaaacaagtttgaattctttactagttgttttagtttgtttttgcctctttttaggttattctatatttgttgttaagggtgatctgccagattgtgaagctgaccaacttttgcagatgatcaaggtccaacagatgcatcgaccaaaacttattggagaggaacttgcacatctgaaagagcagaggtaaaactacgcgtgagtgtggcgtgtatggtggagcaccccttagaagagttaaaggtccatgcgtccattccttgtgtctgtgagtgcatgcacatgattgtgagctgtgtgatgtgggggctgggaaccgaacttggccctttggagagcaggacgtatttgaaccctgagccatctccctgccatttaatgtgtgatcactttaccgttggtgatttgggtaatttgtattttgtgcatttcttttgtagtgctggagatcagcctcttgttcatactaataaatgttctattcagtttatgttcaatctcctgggtttgttttgtattgttttgtcgagacagggtttctctgtatagtcctggctgtcctggaactcactctgtagaccaggctggcctcgaactcagagatccgcctgcctctgcctcccaagtgttgggattaaaggcatgtgccaccatgcccagccttcaatctcctatttttatttatttgtttattaattttttttgatcattttatttatatgaacacacttggatggagggctgggagtttgcgcgtatttaattttaagtatttatttgacaattttatacatgtgtataaatgttttcattatgtcgtccctcactaccctcttttatcccctgtctgttccctctgaatccctcccagcaggtccgcttcctatgctcattgctatttcttctcttccttctcctcctcctcctcttccttcccctcctcctcctcctcctcctcctcctcttccttcccctcctccttctcctcctcctcctccttcccctcctccttctctttctcctcctccttctcctccccctcctcttcctcctcctcttttttcatcccttctttctcctccccttctttctcctcctccttctcttcttcctcttcctcctccttttctccttcctgactcactgaggtttgcttacacagccagcctaccagtggttgtcccattgaagaaaagttactccccctcccttagcagccatagctcttcagctaggcatagggacctctgagtactccctatccatgctggaatgttgatgaattgttcttgtgcaggttttgtgctggtaactatagctgctgtgagtttatgagagcaacagacatattatagtgagaaaataacacggcagcatttcttcctaatctcctgctcttacatcctttctccctgctcttccgtgaagttccttgagccttagagggatgatagagatgtcccatctaagtctgggcatttagcggtcacttattctaaaacactttgaatagttctgctatttgctaggggagagggcagcttttcagcccaaacactaacctgtaggtctaactctatttagaagggtgattgacatgtctgtttattgaaactgcagtagttgtttcccctaccgaggacctgtgaccaacatagccatggacttttgaccaagtttatggtaccaggtcatacctacagaactacctaatgtggagtggccctcaaatccagtaaaacgatggttgggccaggcctggtggcacacctttaatcccagtacttgggagacaaaagcaggtagatctctctgagtttgaagccaaccagctctactgagttctaggacagccagagctagataatagagagacactgtctcaaataaataaaaaagaaagagaagaaaaagtggttgtttgccccataatagtcacgtcactcttgtgtagcagaagaatattacagcatcacatgggctggtttagactattagtgattttcccctccagcagcctttgtagaatctttcagcactgtgaaagcttgtcagcaaggtggaatcttctagcgcagttccagcttggtttctgttatgtaaccaaagtgttacataaccaacatctctgccaattaggtcttactatttagttctggtgggaaactaagaacgatgtctgcaaagaagcagcttttctctgagtggcactagtctataggtctgatgtgcttagaatgcagtttgacatggtcacatactatttgaggagcctctgtatttgtttgcttcttgatataagatctcaagtagctccaactggctgggagtacatatgtttgtgcctccatgttttatttatggtgatggaaactgaactcaggggattgtgaatgctatgcacatattcttcccactgcatttcatctccagcgcttacctcccccaaccaaaatgatttagtgtcaagtgattatttgtagtgttttggctctaatcctgcattttatgcatatactcttatcattgaacagttccttagtcccttccctgttcccttctgttgaaagacaggtctcattaagttgtccagttatcaaacttgacatccttctgtctttggctcaaaagtagctgatactcaacaagcatatgccactctgcccagggaggctgtgttttagtgaagtttatagaatcaacactttgaattcctagaatacattaggtttttatcagcactcagttgttgttagtagaccttatctaatagagcatgttttccatttaaaatctttcatttgcaagtgccttcatgtttatcagacttgatctaaagttgaagaatactggactagagagatggcttggtggttaagaggactggctactttctagaggacctgggtttggttctcggcacccacctgctcgctcacgaccttctgtctccagtgtcatcggatccagcaccctcttctggcctcctcaggcactacacacacattgtgcaagacatacatgcaaacaaaatatccgtgcatattggttagatttttgagacaggatttctaggctgtaattactatgaattcatttgttgtttagtgccctcaaagcagacctggagcgcgtcttagaagcagctgatgggtcgggcatatttgatgaagatgaggatgatttacagagggctctagccataagtcgccaggaaatcgacatggaggatgaagaagctgatctccgcagggccattcagctcagtatgcaaggtttggacatgttgatgtgtactttagtcatttttggagaagtggatcacgtccttaacgtttctgaaagttagtgcacttttggaagttctttgatagttactgcaaaagcaatagctccaaactttgagcatttctttaagattttcttgatcttaaatcatttttttataacttgcattatactaggactgtattgtgtttaacacatttaccattttggttgtggttatgctgttgagtatgatactgagccaatacaacactaatttaattacttttctagtgaccagatgccccttacccaagccagctgttttaataaattcacacagcacttactggctataaagacttatatagactatacagattaagactccagccatgtcacaggatgcatctttttcattgatgtaagcgctcatcatcagtggaggaaagggaaggcaaagccccttagggtaggcagagaaaagtgctgagacactcaaagccgttcctgagagcacaaagcactttatttttgtgattttgttttaatctaattcgtatgaagctgtttctacttctaatgaggttgctcatcatctaaattcctcaaaggtcttagtgtactgaggttttgttatgatggccattatcgttatcctagactcctcacctccaggctcacctctgcatactcttgtggtgtgaagtcccatgttatattaggaggggcttgttgggttattgaagtaataaacagaaaaccatcttaccattttcacaatttacatagaatctgtgcttggtacaattactgttgagagcttagaaacattcaagttgttaaaaacagatgttatggtcatccttcaaaggttgtgaggaatgccttgcctttgaaggtggagatgcaagttaaagagcacagaagtgtggtcttgatacttcttatacgaggtgaacagagagcttgtatcctcacatctgatgcatcacagatcgcatcagccttgcttgcagtaacacattgaattgtaagtccttaattagatttctaagacttccataggctttttaaagttacagaacagtagtggaatgttttaaaactttctagaagcttgctcctataagaacaaacatactactgcttgtacaggtatataaaataattttttgtgtttgtttttaggtagttccagaagtatgtgtgaaaatagtccacagacatcaagtccagatctctcttcagaagagctgcggaggagacgagaagcctactttgaaaagtaaagtagttggtacagattaaagttgcatatttaatacctgctgattttgtctgtttataaattactgcttaccgcctgaacctatgaacgtaagaatatattttctaaaattttttcagagaataaggtgtgaaatacttaatcgtttggagaaaaacgattgccagatcttggataaatttatatagactaggataaaggaaaccttgtgaaattttgcttatcaaaaggaaaatagacttaggacaagcagaactatgtcagtgcctattgatcctttgtatgtagcgttggtcacctatgagtcctgcttaccttctcatcagtagacagggaaaacagcatctgagggaggtggagcctcttcccagtgcagtggcacatgctccctagtctttctcttgtcgctttaggaggtccaagtccaccagcatcagcggcatagaagcataaatctgagccataagcttccgaagctatacgttgtactctgtctatacgtcctcggaagagaaacacttccacttttatagtgtcttcctttacagtaatcatcattcacaagtctttcttttattttttggtttgggcagggctttgttatgtactcctggtggcctcactgatggctatcttcctgtagtcctagctggtctcactactggtggctgttctcctgcctcagtttcccttgtactaggacaggtatatgttgtcgtacctagatttttattttaaaccatactccaccttaaaagttaaataatccatagtagataattgaaccctctgacctcaggtcagaaaggtaaggccagggatggactctgcctggttatataccacatctctcaattcagccatgcatttattttcacatttcaaaatctctgaaaagatgggctttttaagcagctcaaagggcagtgctcagccagtatgaatgagcccccagcccccgagtgcagcacagcagcccctgagcttgagctgattagtaaggcttggactgttctgcatcggctagtgtctgaaggtaatgtttaccttgttctgtttgctggttttttaagtcacaactcataagtatatgaaggaaagttctgatcagctgacatcctcttaatgtgagatatttctagactttattcagtcactgattaatagatttaattatatttacattttagaacagtcttttagtgttttttatgtcctttgagtttttgaaattattactctttaaattatgataaaccttagatttatgtataatgcactcatacttgttactcgttgttggttgagaccagcacacagcccagtttttatgcctctgactcccgttctttccgttctcccacggcatcgggcttgctccaagtcacagtcagcgtgtcattactttttgtgtgtgtctccaaaatattgtgggacgtgtgcttgcttgtgatctgtagggttgcttctggctttgtttttgtgtttttttgagcaatctagctcactgctgtgcaagtcctcaactcctgattatcctgactctcactccgagtgctggagtgcgggtgtgcacaccacatctgacttgactgtttctctctttatttctcctaattagtgctgttgtcacaatatagtaataacaacaacaacaacaacaacataaatatctagttttaaaaagaacttaaaattacttaagtaggcaaaatgagtattctagaaagtttaagtttcttaaaaagtttgttcctgccaggcagtggtggcacacgcctttaatctcagcacttgggaggcagaggcaggcggatttctgagtttgcggccagcctggtctacagagtgagttccaggacagccagggctacacagagagaccctgtcttgaaaaacaacaacaacaaaaaaacaaaaacaaagtttgttcctactatcccttccttcagtaagtgttgttagtgactgtatattcccttctgtcatacacatattcatagtctctctctcagtgtgtgtgtgttcatgtgcgtgtgcatgaacatgtgtgtgtgtgtgtgtgtgtgtgtgtgtgtgtgtgtgtgtgtgtgcaatacgctatctatggttcataggaggtccaaagacaaggctcgcaggttttggtccctcttctccctccatgtgggtcctgtcagtggcccagggcatcaggcttggctgccagcagggtcttcacttgctgagctttgtcaccacctccttttttgtatataaacattttgttaccttttttgaaatgagaatttgaagcttccactgacttacacttttagcagcagtaaaggtaactcagtcccattccatgacgggtcagtgatctatagcaaccacagtgtaaagccgtaacttgcgcttttgagctgacagatttgggcccatcttgtaccctttgggaaaaaaaataaaaacactttgggtatgagcatgcctcttttctagtggtagattgtgtattaaagattgcttctagctttagtcttttatcttctgctgagagcttagacagctagaatattctacctagtcacagatagccaagatgaattaagggttaactttgtagtatttatttttaacattaactagtatttaaaagtgctagtgtgggctggagagatggctcactggttaagagcacttactgctcttccagaggtcccgagtccaattcccagcaaccatattgtggctcacaaccatctgtaatgggatctgatgccctcttctggtgtctgaagacggctacactgtactctcagacataaaacaaatcttaaagaaataatgtactagtgtactacagattttaagaagaaggtgtgcgtgtgggggtggggtgggggaggggtgctggagggtggctcattggttaaagtacttcctgcgcttgccttttcctcaaaccctccatttcttagctggaatagctccctgtttctctaggctctgtcttggctctaagactctgacttccttctttccctccaagctggccctgctgtcagcctattactcacaggtcagcagtcttccctcgtctccccactgcctctgaaggcctcatacttaatggaaatatgaaatatgacacattataggatttcttttcttaggtaaaaatgttactaaaaattagcctactataaattcatagcttatgagtaagggttactaagtaatgtttccttgacatgacattttttttagcagtgatgtgtaaataaagtccactccggcattgttaacacctgctattgggagcataggagtcagtgatgggactgaagactgtcggctgctgcatgctctacagatgtgtgtcagcatcacttacgtcctctctaggatggctttgaatgccgtggtctatctgctacaagaagcggtgtttcccagcagaacaataacacacattcgtagccaaggagtcctgtgatgctttgactgcttattcttgcactgtagctttcatggtgtgacctagtttatcagacagttcagtttaagagacacaaataggtaggggcgtttaagcgaaacactaactaatagttaagttaggggcttaacaatcttaggcattgttctgagccaggcttttgaaatatagaccaatttgtgagaagggctgccaccattgcctgattagggtggtggggtcagtggagagcgcccatgttcagttcccagaacgacccctatggctcataatcacccaagactcagaggattctgcactccattatcacccctgagggtatgtgcgagtgcacacccctgcacgtatgcatgcacgtgagcacacacacacacagagtctaaaacattagatcttttatataacatatttaattagtaaaacattttcttcaattttttatatgtatgggtgtttttcttgcatgtatgtatcagtctcacgtgcatgtagtgcctgaggagccagagaggatattagatccccctgggaccaggattgtagatggttttgtgctgccctataggtgctggaaattgagcccaggtcctttgaagaacagcctgtgccctcaactgctgaaccagctttccagtccctaactaaatcttatcaacaaacaaacgagcaaaaccccagaaattatgtatagctatgatatagttgtcaagactttctggttccactgaaatagctgtgaggcaggattcaaggctgaatctccatgactttgcttactaggaaaacagtgtgtctcactgactcatttatgctttttgtagctcatgtgggttcttagtctgcagccagagaccaggttttagctctgtactgctgtaagcctgaaggaagacatggtgggaggttctgagggactcattccctagcagcatcttcagggcttcacagtggttgggtcagggttggcagctgatttctgttctcattttgcataatgtaaggttataataaccccatgaatatgtacaatattaagtgaaaaattaaaggtaaattaaagggtaactctctgaagttgcattcacacatagaatccgcagagctcaggcctcccttcacatcacccttgtatagaggtttgtagcatcaggaagtcagtattttgcctcaaaggccaacaggaggaaagtggagtgcctacaatctgggttaactttattgctcgctcactttaaaaactcaagcctggggaggacaggcagggtgcccttgggaggggaggccggcagctcctggagttcaaggccatcctggctaccaacctggactagagaccgtttgaaaattgagaagaacaataggaaaaaagtatgctaactataacttagttttaaagttttggtccttttaaaatcacacaacttttaaatctgacttctatgtcatttatgggttttcttggtttttagctctcttgtgtgtttaaagcagaactagtgtgcagagctgcttgcccctcgcaatacactttacccagaggcgtctggaagtgttcttattatagcttggtattcagcatacattttctgaacacaaggatacattcctgcaatgtgttgttttgttttgtttgttgttgcttttgagatagggactgatatgttaccaaggctggtattccattcctgggctcagatttccttttcctttggccagttgggtgactgcaggcatgtgtcacaatgagcttcgctacttttgctttgagacagtgtcttagccagtgctcttgctgtaatgaggcataatgatctcggcaactcaaaaaggggagtatttaattggggctggattacagttcagagatttagtccactgtcacagcagggagcatggcgggatgcaggtagacatgggctggagaagtagctcagagtcctacatcggcatccatagacagagagactgggcctggcataggcatttgaaactttagagtccacccccagtgacacacttcctccagtaagatcacacctatatgaccctgtggggccattcatattcagactattacattctagtccctggtccccacaagcttgtagccatgtcatagtgcaaaatagtccaacttcaaaggtcaccatagtctcttggtcttaagactgcttcaaaatctaaagtgtcttctgagattcatggcaatctcttcactgtaatcccctgtaacatcaaatcacaggtcacaacatacagtggttctgaatatagtcatttctatgtctttaattcttcaagtctgtgatgaagctgctgtgtgacaaggcacagtttcaggtactgggacacaggtaagcagcatcaggttgagctctcattgcttacagaccagacagagtatcaagacagtatgtttgtgccgagaatgaaaatgaaatagtgagaaagccaggaggttgcttgaaacgggatagtcggagagggactccagggagaaacttagtaaatccaggcttgagtggcagcgagggagccagcccgggaaagcacattaaagtgagatagtttgtcttatcaaaggtgttttccagtggcttctaacagtgataaagatatataaaccaacactcatttgtgtaagaatcactactagtgaaccttgaacagaaagtgcaaatacctacctcttctctgataattcaaatgtgtaggttttttgaatcagaactttgacatttttatacttgtaattattaaactaatttctcaccttctgaggtattcaggcagtgaccattttgattcatggaacagcttatttcctacgtgattgcctgctctcctggcagatctcctatgcgttgttttaacagatattcacgtttgaatgtttcaggcaacagcagcagcagcaggaggtagaccgacctggacccctttcatatccacgtgaaagaccgaccacaagttcaggaggacgtaggagcgaccaaggtttgctttctgtccattcacagtgatgctttactcgatacccaagatcctcgtcaattgtactttatatttctcctcctcctcctctccttcctcctctttctcttccccctccttctttatattgggttttttatttgtttgtttctatctttttctttttttttcttttctttctttcttttttttttttgagacagggtttctctgtatagccttggctgtcctacaactcactctgtaaaccatacatagagtcataagagatctgcctgcctctgcctcccagcacagtgattaaagatgtgcaccaccacctggcttttccttttttaaaaatttatgaattttatgtattagtgctctgtctgtatgtatgcctgcatgccagctgagagcatcagatcccattataaatgttgctgggaattgaactcagaacctctggaagagcaacccatgcttctaaccactgagccatctctccagcccccttttcttctttaattgtattataaaactctttttgttttttggttttttgagacagggtttctctgtgtagccctcagctatcctggaactcactctgtagaccaggcgggcctcgaatacagaaatccatctgcctctgcttcccaagtgctgggattaaaggcgtgcaccaccacgcccagcttataaaactcttaaaaatgaatttgtaatataccaatttcctctgaactataagggagatagacacttggtagttgtttggattttatttatttaatgtagttttggttttgagacagtttcattatgtagctagggctagcttggaactcactgtgtagcccagactagcttcaaattcatgagtcttcggtttgggcttttttagaagtaacaggaacaggcatgcaccaccatgccctggttggttctaaaatcgcacacatagtactttaacttcacagttgacacattcctgagaaatccttcagagatgattagaggtaataaataatagtaagtggaaaggaaacacatttcaccacttagtaaaggaaaccatctcgttagcatagtctagataacagctggaggccaggtgactactcacccatcctccagacagcagctgttaagctcgagtcaagtattggtagaagctgaatggagaagaagccctgtctgtcagaggacttcatagaatctatgcagagctctcagagtgacacaaaaacagtaaaaaaaaactgatgaaggggtgctggagagatggctcagcagttaagagtgctgactgctcttccagaggcccagagttcaaatcccagcaaccacatggtggctcacaatcatctataatgggatccaatgccctcttctgatatgttcaaagacatcattgatgtactcacatacataaaataaataaatagataaatcttaaaaaaacaaaaaaaagactggtgaaggattgtggatgtgagatgtgtcttgcactagagagcacattacacagaatcctataatgcagctgcaggtggctttgacacctctgtcctacttgggcacctgcggtcaatgtgcatatatcctacacagatgcctgtatcagaggaggctcaccgaaaggaagatttcattaaaactcacaaggtgacaaaacccaagtacccagggttcacttggaaacaaaccactgttattccaggaaccatgaaagaaggaaccacgtggacaattttaattgagcattgctttttggttttttgttttgttttgttctgtttcgaggcagtctcactctgtagcccagcctggctgtgaattcactattgtcccacgtctgcctctggagtgctgagactctggtcacccgcagccacctgcatctcacacattttagagcagaagagtaactgaaatgtaaaagctcagtgaatggacttagcatagaaagctggtagactagatgacaggcatgtagaaatccttcccatcaacacggcaaactgactgtagccaatgagcagagcgctggaggcatctgacattattagctcagcctaactcacaggagcctcctaactggaagcagaaggggtggtgaaaacatctgatgatcttttcatcgtctcagctgaacagaaactagaagcctgcaagtggaagaaattgagtgaacttcaaatttatgtaaacgaaaagaaatacttactaggacttctgaaaactgaaggcataatcaaaagaaagaactaatcaaagaaagaactgttcttcaaagaacagcaatttgaagtgggaggtgtctatgagtgacagtggataatgtggttcccatgctgaaagaaacctttaatccaggactacatatgctggacttacatacttactaggattgggaaagagtttcaaaaatgtctccagcagttaaagaaagggatggctgttcagggctggcaatcagatcagcatctcgattagccaccatcagagatgcttgtacttgcagtggatgggaacaaatgagtaactggcttggaatacactaaacaggatgtgtcatcaaaccctgcccttcaggcttcagggaactttgagggaaaggtagcagaaagatggtcagagctggtgggggcggaagacaccaggaagcagcgccttcccgacacagcagagctgatgcgcggatgaactcacaaatggtggcagggtgctcaggtcaagccttgtggtgtctcgcagctaagaggggggagtgagtgaacgccatctcccatacctaactcagaagctatctctagttgccaaacctgacaatcttaatctaaccatcagaacccacgtgatggaagcgggcactaactctgtctgtacatgtcatggcacactatgcccacagagttacacacagttaacaaagtctttgtggggaaaaaaaaaacaaactagtattcaagtagaaatatgtttgctaagaatttgctttttcttttttcctttatcttggacaggtttcaagtagcttgggctggcttcaaatgttttatatatatagtcaaggacaaccttgagttctgattctcctgcctctgtttcctaagagctgggattacaggagtgtgcctccatttcccgtgttatgccatgctagggattgagcccagagccttgcgcatactaggcaaacgttctaccaacttagctatagctctattcagaagtttgccagtgatggggatcttgcagaagttgttctgagaactctgttttctttcccaggaggcgacgctgtgagtgaagaggacatgcttcgggcagctgtgaccatgtctttagaaactgctaaagacaacttgaaagcagaaagaaaaaaatagtacctttaaaagtcattttgctactcacactttgtaacattgtctgtgtgattacagtgtaagggccactttggcagtatgttcaccagaagagataaagacactgtagtggtttgtaagcagaaaggcagaaatgtgtcataggactaaggaacgatcgagatactagccaaagaggcagtcagcaatgaaagaaacttttctaaatgtcccgttttgtttttcaaatgtgcaatatctgactgaaattatggaatttttgttggctcttttggaccaactgattagctcttgccacagaacttgatcctataatgtttcgttttctctctgcattgggggtggcttggctcacttgagcttttacttcatttcagacctaccttttatgaaatgtcttttatatgtcttgttacagaaagatcagtctgtcttctcatacatatgtcgggcacgtggatgcttcctggtggtattttctctaatgtggtgatgtgttgcttttaaagcctttgttagtgggatcacatttcctaattgtgctgcattcctctactctgcagtcagctctgttcttgtaactgagcacgtgagcgtgctctgtctggatgccctgagagtggctgactcctggctggagcccttcctgtaccttccttcctctcttctccagctgagaaaagaggaggcagaggacacaaacagatttccttctacgtaacatgcaccatgaatgcaccacaggagaaactcgcccttcagtcctggtggtgggtttgtcctagtttttcatctgtgacaggagctttgtgttctaatcacgattaagtcctggaaaatagatgcctgcttcactttctaaaaattaaaaatatttttttttctttttctagtagaaaataggctgctaggatgatggtctagaatctgaaagtaatttactaataaaatatatttaaataatactgtgggttgacccttgcaatcatgtttaaatcgcttaagaattacagaagtcacaaagcttaaagggtctgtttgtaaataggaaagtccttagttttgataaacattaagcaggatgcagagctagtcttgctgggtcaatacgtggtatgatttgggtggaaattaactctgtgtctttgtcatggtgtcatagataccctgatacctgctttcccctccctcccctttgaagcccctttgaatggtgacttgtacataggtaaagtccaagaagagattgtagccagcttaggaaggggcagcatgctatagtgctctactggtgtgtgctctgcacacgtttttatcagggaaagttttggatgtaggatttattgctgtctaactgaaaaagatacaaatatttttatttatgcttatgaaatagctttttcttgataggatggatgtttggtttggtttggttgtgcgagggattgaacccagggcctccagtgtgctaggcaagcgccctacctctgagctatatccccagatccagaacaggggtttccttgtttgctttttgttgtttttcttagccattttgtgccaactacagttgttttttaaaaatttgcttcatgaaaaattaggcagtcctattttaaaatctatgaagttttctttcagtaattgcaaaggttcagaagagttgggcagctgtagggtgttagagttaggactttgcttacagttgattgctatactgaagtatgtaactactcccgtatgctgctcacatgtctagacattcattggcccttttcctttaccctttgaaaaatcacattaaactttccatacatttagattggtgtgctgcctgatgaaaaatgagaaagccaatatacacttcagctttaactttagagtttataaaatgttcatataacacaccctacttaaatcatgtatgaaatacagcatgttagtcttttattagaaatgttttaaagagaaactgagcacacactgaatctatttgagtgaagctttttagtttgttatatttatggcattgtccaggcagatccaaaatcaccattgaattgccatcctctttgggttgacctaggcttactaaacatttagatttcattattaatgagtagccagtatgaaaagatgccaatgcttattctagccacagtatccaaagtgtaggagttctatgacattctaattcataaccaggagttgctgtttatagtactgcaggacagacaggggcaagggactccactgccacggctggtcacagactcgactaacttttccatttgtttttttaccaattggaatacttaaatgtattgtatgtaatgaatactaaactactgataatcattttttttaaatctgtaacttgttctgccagataaaatgcgtacagccgtgatgctagtgttataaccaagtgtaaggaccctttggaaggccagacatggtgctgtgttcctttgatgctggtacttaggagaaatctgcagaggtaggcagatttcttcttgagttcaaggccagcctggtctacatagtaagttccagactttctggagctgcacagtaagaccctgtcttaaacaaaaaacaaacaaaccaacctttggaaagatcactttcatattttgggatgtcatgagcttatctatgtttcaaaattcagaatagctgtcctttggcctaaaccataaatctacacccccaacgacagtactatgcagacatttcactgatttaagttgtttgatacagtcagtgcaggtgaactccatgctaaagttttaagccttggccaaataacttacacctcacagactgtctgaggcggtgcttctttttttcctgaaaacttgatttttcttgatgaagccaaagttaatgagcatgaattctcaaaggagtagtctgctttgttttacttaatatcaggttgagtgaagtaagttttattcgtgtcagagtctaagccacacattttgaatacccacatgtttgatactatttaagtcatgctgtgccaagagttactaaattcttagaactggccctgtgccctgcctaaggccagacagggcagtgcggaacccaaatgtgctatctgagagtcttaagctaggaaatctgggtgttttaaattagtgagaggtttcagttagtgttgaaacctccagatccgacttgatgttaggcagtgtggatgtgctcagtggtagagcagttacctagtggcccaggccttgggttcagtctctaacactgcaaaaggagagcagtggctcacagtgtaacctacgtttagagagacatgaaaggaagtactttcaaagtgaatgtttgttgtaatttagtcctaacaagtgtagagctatgatatgtgaccttaattaagaaaaaccagattggatcagtagtatttttgttgtttttcatatttaacataaaaattcccttcatccctaatttgtttataattaaagagacaaattgattttgtattttttcaaagttttatacatattaaaagggttttgttgtagtctatcatgaatgaaaaggatatttttttttttaatttgaggaatacttttgtgtgtgtgtgcctaaaatggtctgtcattttaagaattagcacaaaaaaaaaattagctagttcctaaatgtatggaggtttaatagtaccagtacacagttgtgggtgaggcactagtgagaagtgtgtgggaaatgcagctgggtaggtgggactcacttgtctctgaatggtttaaaggtggtatttcctggaatttttttaatgattttttttttcaaggaagacagacattcgaaatgtgcttatcaaatttctacaacactggactaataggaataactttttttttaaaaaaaaaagactgttctgtataaataaaatatatgaaactcaagtgcaaaagccgtgaaaataaaaggcattgtcttctgtcaatgtgatgcactgtggccgagcagttccctcaggactcaactctgcagcccttcctcctgtgcctcaagtgtcggctgccactccacaggtcttccgtctgtcggctcctttgaaagccgggcttccaaagccctgttgaacactgagggttctggtgatgtgtgttaatgagttgtattttaaatatcagagattattaaataaagagaatgattttctattaa

SEQ ID NO: 4 - DNA, 14 bp, Artificial sequence
  Synthetic oligonucleotide
aagaaaccaaaccc

SEQ ID NO: 5 - DNA, 14 bp, Artificial sequence
  Synthetic oligonucleotide
aaagaaaccaaacc

SEQ ID NO: 6 - DNA, 14 bp, Artificial sequence
  Synthetic oligonucleotide
aaaagaaaccaaac

SEQ ID NO: 7 - DNA, 14 bp, Artificial sequence
  Synthetic oligonucleotide
caaaagaaaccaaa

SEQ ID NO: 8 - DNA, 14 bp, Artificial sequence
  Synthetic oligonucleotide
ccaaaagaaaccaa

SEQ ID NO: 9 - DNA, 14 bp, Artificial sequence
  Synthetic oligonucleotide
tccactcctaatac

SEQ ID NO: 10 - DNA, 14 bp, Artificial sequence
  Synthetic oligonucleotide
gtccactcctaata

SEQ ID NO: 11 - DNA, 14 bp, Artificial sequence
  Synthetic oligonucleotide
agtccactcctaat

SEQ ID NO: 12 - DNA, 14 bp, Artificial sequence
  Synthetic oligonucleotide
cagtccactcctaa

SEQ ID NO: 13 - DNA, 14 bp, Artificial sequence
  Synthetic oligonucleotide
ccagtccactccta

SEQ ID NO: 14 - DNA, 14 bp, Artificial sequence
  Synthetic oligonucleotide
actctttccaaaca

SEQ ID NO: 15 - DNA, 14 bp, Artificial sequence
  Synthetic oligonucleotide
aactctttccaaac

SEQ ID NO: 16 - DNA, 14 bp, Artificial sequence
  Synthetic oligonucleotide
caactctttccaaa

SEQ ID NO: 17 - DNA, 14 bp, Artificial sequence
  Synthetic oligonucleotide
gcaactctttccaa

SEQ ID NO: 18 - DNA, 14 bp, Artificial sequence
  Synthetic oligonucleotide
agcaactctttcca

SEQ ID NO: 19 - DNA, 14 bp, Artificial sequence
  Synthetic oligonucleotide
cagcaactctttcc

SEQ ID NO: 20 - DNA, 14 bp, Artificial sequence
  Synthetic oligonucleotide
ccagcaactctttc

SEQ ID NO: 21 - DNA, 14 bp, Artificial sequence
  Synthetic oligonucleotide
accagcaactcttt

SEQ ID NO: 22 - DNA, 14 bp, Artificial sequence
  Synthetic oligonucleotide
ctcctattaaataa

SEQ ID NO: 23 - DNA, 14 bp, Artificial sequence
  Synthetic oligonucleotide
cctcctattaaata

SEQ ID NO: 24 - DNA, 14 bp, Artificial sequence
  Synthetic oligonucleotide
tcctcctattaaat

SEQ ID NO: 25 - DNA, 14 bp, Artificial sequence
  Synthetic oligonucleotide
ctcctcctattaaa

SEQ ID NO: 26 - DNA, 14 bp, Artificial sequence
  Synthetic oligonucleotide
gctcctcctattaa

SEQ ID NO: 27 - DNA, 14 bp, Artificial sequence
  Synthetic oligonucleotide
tgctcctcctatta

SEQ ID NO: 28 - DNA, 14 bp, Artificial sequence
  Synthetic oligonucleotide
ttgctcctcctatt

SEQ ID NO: 29 - DNA, 14 bp, Artificial sequence
  Synthetic oligonucleotide
tttgctcctcctat

SEQ ID NO: 30 - DNA, 14 bp, Artificial sequence
  Synthetic oligonucleotide
ctttgctcctccta

SEQ ID NO: 31 - DNA, 14 bp, Artificial sequence
  Synthetic oligonucleotide
cctttgctcctcct

SEQ ID NO: 32 - DNA, 14 bp, Artificial sequence
  Synthetic oligonucleotide
ccctttgctcctcc

SEQ ID NO: 33 - DNA, 14 bp, Artificial sequence
  Synthetic oligonucleotide
accctttgctcctc

SEQ ID NO: 34 - DNA, 14 bp, Artificial sequence
  Synthetic oligonucleotide
aaccctttgctcct

SEQ ID NO: 35 - DNA, 14 bp, Artificial sequence
  Synthetic oligonucleotide
aaaccctttgctcc

SEQ ID NO: 36 - DNA, 14 bp, Artificial sequence
  Synthetic oligonucleotide
aaaaccctttgctc

SEQ ID NO: 37 - DNA, 14 bp, Artificial sequence
  Synthetic oligonucleotide
aaaaaccctttgct

SEQ ID NO: 38 - DNA, 14 bp, Artificial sequence
  Synthetic oligonucleotide
caaaaaccctttgc

SEQ ID NO: 39 - DNA, 14 bp, Artificial sequence
  Synthetic oligonucleotide
acaaaaaccctttg

SEQ ID NO: 40 - DNA, 14 bp, Artificial sequence
  Synthetic oligonucleotide
aacaaaaacccttt

SEQ ID NO: 41 - DNA, 14 bp, Artificial sequence
  Synthetic oligonucleotide
aaacaaaaaccctt

SEQ ID NO: 42 - DNA, 14 bp, Artificial sequence
  Synthetic oligonucleotide
aaaacaaaaaccct

SEQ ID NO: 43 - DNA, 14 bp, Artificial sequence
  Synthetic oligonucleotide
taaaacaaaaaccc

SEQ ID NO: 44 - DNA, 14 bp, Artificial sequence
  Synthetic oligonucleotide
ataaaacaaaaacc

SEQ ID NO: 45 - DNA, 14 bp, Artificial sequence
  Synthetic oligonucleotide
aataaaacaaaaac

SEQ ID NO: 46 - DNA, 14 bp, Artificial sequence
  Synthetic oligonucleotide
taataaaacaaaaa

SEQ ID NO: 47 - DNA, 14 bp, Artificial sequence
  Synthetic oligonucleotide
ttaataaaacaaaa

SEQ ID NO: 48 - DNA, 14 bp, Artificial sequence
  Synthetic oligonucleotide
tttaataaaacaaa

SEQ ID NO: 49 - DNA, 14 bp, Artificial sequence
  Synthetic oligonucleotide
atttaataaaacaa

SEQ ID NO: 50 - DNA, 14 bp, Artificial sequence
  Synthetic oligonucleotide
ttaaaataaaaatt

SEQ ID NO: 51 - DNA, 14 bp, Artificial sequence
  Synthetic oligonucleotide
tttaaaataaaaat

SEQ ID NO: 52 - DNA, 14 bp, Artificial sequence
  Synthetic oligonucleotide
ctttaaaataaaaa

SEQ ID NO: 53 - DNA, 14 bp, Artificial sequence
  Synthetic oligonucleotide
tctttaaaataaaa

SEQ ID NO: 54 - DNA, 14 bp, Artificial sequence
  Synthetic oligonucleotide
atctttaaaataaa

SEQ ID NO: 55 - DNA, 14 bp, Artificial sequence
  Synthetic oligonucleotide
catctttaaaataa

SEQ ID NO: 56 - DNA, 14 bp, Artificial sequence
  Synthetic oligonucleotide
ccatctttaaaata

SEQ ID NO: 57 - DNA, 14 bp, Artificial sequence
  Synthetic oligonucleotide
tctaacttaataaa

SEQ ID NO: 58 - DNA, 14 bp, Artificial sequence
  Synthetic oligonucleotide
ttctaacttaataa

SEQ ID NO: 59 - DNA, 14 bp, Artificial sequence
  Synthetic oligonucleotide
attctaacttaata

SEQ ID NO: 60 - DNA, 14 bp, Artificial sequence
  Synthetic oligonucleotide
cattctaacttaat

SEQ ID NO: 61 - DNA, 14 bp, Artificial sequence
  Synthetic oligonucleotide
acattctaacttaa

SEQ ID NO: 62 - DNA, 14 bp, Artificial sequence
  Synthetic oligonucleotide
tacattctaactta

SEQ ID NO: 63 - DNA, 14 bp, Artificial sequence
  Synthetic oligonucleotide
ttacattctaactt

SEQ ID NO: 64 - DNA, 14 bp, Artificial sequence
  Synthetic oligonucleotide
tttacattctaact

SEQ ID NO: 65 - DNA, 14 bp, Artificial sequence
  Synthetic oligonucleotide
ttttacattctaac

SEQ ID NO: 66 - DNA, 14 bp, Artificial sequence
  Synthetic oligonucleotide
tttttacattctaa

SEQ ID NO: 67 - DNA, 14 bp, Artificial sequence
  Synthetic oligonucleotide
gtttttacattcta

SEQ ID NO: 68 - DNA, 14 bp, Artificial sequence
  Synthetic oligonucleotide
tgtttttacattct

SEQ ID NO: 69 - DNA, 14 bp, Artificial sequence
  Synthetic oligonucleotide
ctgtttttacattc

SEQ ID NO: 70 - DNA, 14 bp, Artificial sequence
  Synthetic oligonucleotide
ttcaaatatttatt

SEQ ID NO: 71 - DNA, 14 bp, Artificial sequence
  Synthetic oligonucleotide
attcaaatatttat

SEQ ID NO: 72 - DNA, 14 bp, Artificial sequence
  Synthetic oligonucleotide
cattcaaatattta

SEQ ID NO: 73 - DNA, 14 bp, Artificial sequence
  Synthetic oligonucleotide
ccattcaaatattt

SEQ ID NO: 74 - DNA, 14 bp, Artificial sequence
  Synthetic oligonucleotide
cccattcaaatatt

SEQ ID NO: 75 - DNA, 14 bp, Artificial sequence
  Synthetic oligonucleotide
ccccattcaaatat

SEQ ID NO: 76 - DNA, 14 bp, Artificial sequence
  Synthetic oligonucleotide
gccccattcaaata

SEQ ID NO: 77 - DNA, 14 bp, Artificial sequence
  Synthetic oligonucleotide
tatacatttttttc

SEQ ID NO: 78 - DNA, 14 bp, Artificial sequence
  Synthetic oligonucleotide
atatacattttttt

SEQ ID NO: 79 - DNA, 14 bp, Artificial sequence
  Synthetic oligonucleotide
tatatacatttttt

SEQ ID NO: 80 - DNA, 14 bp, Artificial sequence
  Synthetic oligonucleotide
atatatacattttt

SEQ ID NO: 81 - DNA, 14 bp, Artificial sequence
  Synthetic oligonucleotide
aatatatacatttt

SEQ ID NO: 82 - DNA, 14 bp, Artificial sequence
  Synthetic oligonucleotide
aaatatatacattt

SEQ ID NO: 83 - DNA, 14 bp, Artificial sequence
  Synthetic oligonucleotide
caaatatatacatt

SEQ ID NO: 84 - DNA, 14 bp, Artificial sequence
  Synthetic oligonucleotide
tcaaatatatacat

SEQ ID NO: 85 - DNA, 14 bp, Artificial sequence
  Synthetic oligonucleotide
ttcaaatatataca

SEQ ID NO: 86 - DNA, 14 bp, Artificial sequence
  Synthetic oligonucleotide
attcaaatatatac

SEQ ID NO: 87 - DNA, 14 bp, Artificial sequence
  Synthetic oligonucleotide
cattcaaatatata

SEQ ID NO: 88 - DNA, 14 bp, Artificial sequence
  Synthetic oligonucleotide
ccattcaaatatat

SEQ ID NO: 89 - DNA, 14 bp, Artificial sequence
  Synthetic oligonucleotide
tccattcaaatata

SEQ ID NO: 90 - DNA, 14 bp, Artificial sequence
  Synthetic oligonucleotide
atccattcaaatat

SEQ ID NO: 91 - DNA, 14 bp, Artificial sequence
  Synthetic oligonucleotide
tatccattcaaata

SEQ ID NO: 92 - DNA, 14 bp, Artificial sequence
  Synthetic oligonucleotide
ttatccattcaaat

SEQ ID NO: 93 - DNA, 14 bp, Artificial sequence
  Synthetic oligonucleotide
tttatccattcaaa

SEQ ID NO: 94 - DNA, 14 bp, Artificial sequence
  Synthetic oligonucleotide
ctttatccattcaa

SEQ ID NO: 95 - DNA, 14 bp, Artificial sequence
  Synthetic oligonucleotide
tctttatccattca

SEQ ID NO: 96 - DNA, 14 bp, Artificial sequence
  Synthetic oligonucleotide
ctctttatccattc

SEQ ID NO: 97 - DNA, 14 bp, Artificial sequence
  Synthetic oligonucleotide
tctctttatccatt

SEQ ID NO: 98 - DNA, 14 bp, Artificial sequence
  Synthetic oligonucleotide
ccatatatatctca

SEQ ID NO: 99 - DNA, 14 bp, Artificial sequence
  Synthetic oligonucleotide
accatatatatctc

SEQ ID NO: 100 - DNA, 14 bp, Artificial sequence
  Synthetic oligonucleotide
caccatatatatct

SEQ ID NO: 101 - DNA, 14 bp, Artificial sequence
  Synthetic oligonucleotide
gcaccatatatatc

SEQ ID NO: 102 - DNA, 14 bp, Artificial sequence
  Synthetic oligonucleotide
agcaccatatatat

SEQ ID NO: 103 - DNA, 14 bp, Artificial sequence
  Synthetic oligonucleotide
cagcaccatatata

SEQ ID NO: 104 - DNA, 14 bp, Artificial sequence
  Synthetic oligonucleotide
acagcaccatatat

SEQ ID NO: 105 - DNA, 14 bp, Artificial sequence
  Synthetic oligonucleotide
aacagcaccatata

SEQ ID NO: 106 - DNA, 14 bp, Artificial sequence
  Synthetic oligonucleotide
aaaacaaacaacaa

SEQ ID NO: 107 - DNA, 14 bp, Artificial sequence
  Synthetic oligonucleotide
taaaacaaacaaca

SEQ ID NO: 108 - DNA, 14 bp, Artificial sequence
  Synthetic oligonucleotide
ctaaaacaaacaac

SEQ ID NO: 109 - DNA, 14 bp, Artificial sequence
  Synthetic oligonucleotide
actaaaacaaacaa

SEQ ID NO: 110 - DNA, 14 bp, Artificial sequence
  Synthetic oligonucleotide
aactaaaacaaaca

SEQ ID NO: 111 - DNA, 14 bp, Artificial sequence
  Synthetic oligonucleotide
gaactaaaacaaac

SEQ ID NO: 112 - DNA, 14 bp, Artificial sequence
  Synthetic oligonucleotide
agaactaaaacaaa

SEQ ID NO: 113 - DNA, 14 bp, Artificial sequence
  Synthetic oligonucleotide
cagaactaaaacaa

SEQ ID NO: 114 - DNA, 14 bp, Artificial sequence
  Synthetic oligonucleotide
ccagaactaaaaca

SEQ ID NO: 115 - DNA, 14 bp, Artificial sequence
  Synthetic oligonucleotide
accagaactaaaac

SEQ ID NO: 116 - DNA, 14 bp, Artificial sequence
  Synthetic oligonucleotide
atgttattatcccc

SEQ ID NO: 117 - DNA, 14 bp, Artificial sequence
  Synthetic oligonucleotide
tatgttattatccc

SEQ ID NO: 118 - DNA, 14 bp, Artificial sequence
  Synthetic oligonucleotide
ctatgttattatcc

SEQ ID NO: 119 - DNA, 14 bp, Artificial sequence
  Synthetic oligonucleotide
tctatgttattatc

SEQ ID NO: 120 - DNA, 14 bp, Artificial sequence
  Synthetic oligonucleotide
tacactctaactct

SEQ ID NO: 121 - DNA, 14 bp, Artificial sequence
  Synthetic oligonucleotide
ctacactctaactc

SEQ ID NO: 122 - DNA, 14 bp, Artificial sequence
  Synthetic oligonucleotide
tctacactctaact

SEQ ID NO: 123 - DNA, 14 bp, Artificial sequence
  Synthetic oligonucleotide
ctctacactctaac

SEQ ID NO: 124 - DNA, 14 bp, Artificial sequence
  Synthetic oligonucleotide
tctctacactctaa

SEQ ID NO: 125 - DNA, 14 bp, Artificial sequence
  Synthetic oligonucleotide
ttctctacactcta

SEQ ID NO: 126 - DNA, 14 bp, Artificial sequence
  Synthetic oligonucleotide
cttctctacactct

SEQ ID NO: 127 - DNA, 14 bp, Artificial sequence
  Synthetic oligonucleotide
ccttctctacactc

SEQ ID NO: 128 - DNA, 14 bp, Artificial sequence
  Synthetic oligonucleotide
tacaacacaaatca

SEQ ID NO: 129 - DNA, 14 bp, Artificial sequence
  Synthetic oligonucleotide
ctacaacacaaatc

SEQ ID NO: 130 - DNA, 14 bp, Artificial sequence
  Synthetic oligonucleotide
actacaacacaaat

SEQ ID NO: 131 - DNA, 14 bp, Artificial sequence
  Synthetic oligonucleotide
aactacaacacaaa

SEQ ID NO: 132 - DNA, 14 bp, Artificial sequence
  Synthetic oligonucleotide
taactacaacacaa

SEQ ID NO: 133 - DNA, 14 bp, Artificial sequence
  Synthetic oligonucleotide
ctaactacaacaca

SEQ ID NO: 134 - DNA, 14 bp, Artificial sequence
  Synthetic oligonucleotide
actaactacaacac

SEQ ID NO: 135 - DNA, 14 bp, Artificial sequence
  Synthetic oligonucleotide
tactaactacaaca

SEQ ID NO: 136 - DNA, 14 bp, Artificial sequence
  Synthetic oligonucleotide
ctactaactacaac

SEQ ID NO: 137 - DNA, 14 bp, Artificial sequence
  Synthetic oligonucleotide
actactaactacaa

SEQ ID NO: 138 - DNA, 14 bp, Artificial sequence
  Synthetic oligonucleotide
cactactaactaca

SEQ ID NO: 139 - DNA, 14 bp, Artificial sequence
  Synthetic oligonucleotide
acactactaactac

SEQ ID NO: 140 - DNA, 14 bp, Artificial sequence
  Synthetic oligonucleotide
gacactactaacta

SEQ ID NO: 141 - DNA, 14 bp, Artificial sequence
  Synthetic oligonucleotide
agacactactaact

SEQ ID NO: 142 - DNA, 14 bp, Artificial sequence
  Synthetic oligonucleotide
tttacccccaacct

SEQ ID NO: 143 - DNA, 14 bp, Artificial sequence
  Synthetic oligonucleotide
atttacccccaacc

SEQ ID NO: 144 - DNA, 14 bp, Artificial sequence
  Synthetic oligonucleotide
catttacccccaac

SEQ ID NO: 145 - DNA, 14 bp, Artificial sequence
  Synthetic oligonucleotide
tcatttacccccaa

SEQ ID NO: 146 - DNA, 14 bp, Artificial sequence
  Synthetic oligonucleotide
atcatttaccccca

SEQ ID NO: 147 - DNA, 14 bp, Artificial sequence
  Synthetic oligonucleotide
aatcatttaccccc

SEQ ID NO: 148 - DNA, 14 bp, Artificial sequence
  Synthetic oligonucleotide
aaatcatttacccc

SEQ ID NO: 149 - DNA, 14 bp, Artificial sequence
  Synthetic oligonucleotide
caaatcatttaccc

SEQ ID NO: 150 - DNA, 14 bp, Artificial sequence
  Synthetic oligonucleotide
ccaaatcatttacc

SEQ ID NO: 151 - DNA, 14 bp, Artificial sequence
  Synthetic oligonucleotide
accaaatcatttac

SEQ ID NO: 152 - DNA, 14 bp, Artificial sequence
  Synthetic oligonucleotide
taccaaatcattta

SEQ ID NO: 153 - DNA, 14 bp, Artificial sequence
  Synthetic oligonucleotide
ctaccaaatcattt

SEQ ID NO: 154 - DNA, 14 bp, Artificial sequence
  Synthetic oligonucleotide
gctaccaaatcatt

SEQ ID NO: 155 - DNA, 14 bp, Artificial sequence
  Synthetic oligonucleotide
tgctaccaaatcat

SEQ ID NO: 156 - DNA, 14 bp, Artificial sequence
  Synthetic oligonucleotide
ctgctaccaaatca

SEQ ID NO: 157 - DNA, 14 bp, Artificial sequence
  Synthetic oligonucleotide
actgctaccaaatc

SEQ ID NO: 158 - DNA, 14 bp, Artificial sequence
  Synthetic oligonucleotide
aactgctaccaaat

SEQ ID NO: 159 - DNA, 14 bp, Artificial sequence
  Synthetic oligonucleotide
aagctttaatcaaa

SEQ ID NO: 160 - DNA, 14 bp, Artificial sequence
  Synthetic oligonucleotide
caagctttaatcaa

SEQ ID NO: 161 - DNA, 14 bp, Artificial sequence
  Synthetic oligonucleotide
tcaagctttaatca

SEQ ID NO: 162 - DNA, 14 bp, Artificial sequence
  Synthetic oligonucleotide
atcaagctttaatc

SEQ ID NO: 163 - DNA, 14 bp, Artificial sequence
  Synthetic oligonucleotide
catcaagctttaat

SEQ ID NO: 164 - DNA, 14 bp, Artificial sequence
  Synthetic oligonucleotide
tcaaactatcccca

SEQ ID NO: 165 - DNA, 14 bp, Artificial sequence
  Synthetic oligonucleotide
ctcaaactatcccc

SEQ ID NO: 166 - DNA, 14 bp, Artificial sequence
  Synthetic oligonucleotide
tctcaaactatccc

SEQ ID NO: 167 - DNA, 14 bp, Artificial sequence
  Synthetic oligonucleotide
atctcaaactatcc

SEQ ID NO: 168 - DNA, 14 bp, Artificial sequence
  Synthetic oligonucleotide
tatctcaaactatc

SEQ ID NO: 169 - DNA, 14 bp, Artificial sequence
  Synthetic oligonucleotide
ttatctcaaactat

SEQ ID NO: 170 - DNA, 14 bp, Artificial sequence
  Synthetic oligonucleotide
cttatctcaaacta

SEQ ID NO: 171 - DNA, 14 bp, Artificial sequence
  Synthetic oligonucleotide
ccttatctcaaact

SEQ ID NO: 172 - DNA, 14 bp, Artificial sequence
  Synthetic oligonucleotide
cccttatctcaaac

SEQ ID NO: 173 - DNA, 14 bp, Artificial sequence
  Synthetic oligonucleotide
gcccttatctcaaa

SEQ ID NO: 174 - DNA, 14 bp, Artificial sequence
  Synthetic oligonucleotide
tgcccttatctcaa

SEQ ID NO: 175 - DNA, 14 bp, Artificial sequence
  Synthetic oligonucleotide
caaacttcatcaaa

SEQ ID NO: 176 - DNA, 14 bp, Artificial sequence
  Synthetic oligonucleotide
tcaaacttcatcaa

SEQ ID NO: 177 - DNA, 14 bp, Artificial sequence
  Synthetic oligonucleotide
atcaaacttcatca

SEQ ID NO: 178 - DNA, 14 bp, Artificial sequence
  Synthetic oligonucleotide
aatcaaacttcatc

SEQ ID NO: 179 - DNA, 14 bp, Artificial sequence
  Synthetic oligonucleotide
aaatcaaacttcat

SEQ ID NO: 180 - DNA, 14 bp, Artificial sequence
  Synthetic oligonucleotide
gaaatcaaacttca

SEQ ID NO: 181 - DNA, 14 bp, Artificial sequence
  Synthetic oligonucleotide
tgaaatcaaacttc

SEQ ID NO: 182 - DNA, 14 bp, Artificial sequence
  Synthetic oligonucleotide
ttgaaatcaaactt

SEQ ID NO: 183 - DNA, 14 bp, Artificial sequence
  Synthetic oligonucleotide
aacacaaatttcct

SEQ ID NO: 184 - DNA, 14 bp, Artificial sequence
  Synthetic oligonucleotide
taacacaaatttcc

SEQ ID NO: 185 - DNA, 14 bp, Artificial sequence
  Synthetic oligonucleotide
ctaacacaaatttc

SEQ ID NO: 186 - DNA, 14 bp, Artificial sequence
  Synthetic oligonucleotide
gctaacacaaattt

SEQ ID NO: 187 - DNA, 14 bp, Artificial sequence
  Synthetic oligonucleotide
tgctaacacaaatt

SEQ ID NO: 188 - DNA, 14 bp, Artificial sequence
  Synthetic oligonucleotide
ttgctaacacaaat

SEQ ID NO: 189 - DNA, 14 bp, Artificial sequence
  Synthetic oligonucleotide
tttgctaacacaaa

SEQ ID NO: 190 - DNA, 14 bp, Artificial sequence
  Synthetic oligonucleotide
ctttgctaacacaa

SEQ ID NO: 191 - DNA, 14 bp, Artificial sequence
  Synthetic oligonucleotide
cctttgctaacaca

SEQ ID NO: 192 - DNA, 14 bp, Artificial sequence
  Synthetic oligonucleotide
taactaataattat

SEQ ID NO: 193 - DNA, 14 bp, Artificial sequence
  Synthetic oligonucleotide
ataactaataatta

SEQ ID NO: 194 - DNA, 14 bp, Artificial sequence
  Synthetic oligonucleotide
aataactaataatt

SEQ ID NO: 195 - DNA, 14 bp, Artificial sequence
  Synthetic oligonucleotide
taataactaataat

SEQ ID NO: 196 - DNA, 14 bp, Artificial sequence
  Synthetic oligonucleotide
ataataactaataa

SEQ ID NO: 197 - DNA, 14 bp, Artificial sequence
  Synthetic oligonucleotide
aataataactaata

SEQ ID NO: 198 - DNA, 14 bp, Artificial sequence
  Synthetic oligonucleotide
caataataactaat

SEQ ID NO: 199 - DNA, 14 bp, Artificial sequence
  Synthetic oligonucleotide
ccaataataactaa

SEQ ID NO: 200 - DNA, 14 bp, Artificial sequence
  Synthetic oligonucleotide
accaataataacta

SEQ ID NO: 201 - DNA, 14 bp, Artificial sequence
  Synthetic oligonucleotide
aaccaataataact

SEQ ID NO: 202 - DNA, 14 bp, Artificial sequence
  Synthetic oligonucleotide
taaccaataataac

SEQ ID NO: 203 - DNA, 14 bp, Artificial sequence
  Synthetic oligonucleotide
ataaccaataataa

SEQ ID NO: 204 - DNA, 14 bp, Artificial sequence
  Synthetic oligonucleotide
tataaccaataata

SEQ ID NO: 205 - DNA, 14 bp, Artificial sequence
  Synthetic oligonucleotide
gtataaccaataat

SEQ ID NO: 206 - DNA, 14 bp, Artificial sequence
  Synthetic oligonucleotide
acatcacacaattt

SEQ ID NO: 207 - DNA, 14 bp, Artificial sequence
  Synthetic oligonucleotide
gacatcacacaatt

SEQ ID NO: 208 - DNA, 14 bp, Artificial sequence
  Synthetic oligonucleotide
tgacatcacacaat

SEQ ID NO: 209 - DNA, 14 bp, Artificial sequence
  Synthetic oligonucleotide
ctgacatcacacaa

SEQ ID NO: 210 - DNA, 14 bp, Artificial sequence
  Synthetic oligonucleotide
tctgacatcacaca

SEQ ID NO: 211 - DNA, 14 bp, Artificial sequence
  Synthetic oligonucleotide
atctgacatcacac

SEQ ID NO: 212 - DNA, 14 bp, Artificial sequence
  Synthetic oligonucleotide
ttccttaacccaac

SEQ ID NO: 213 - DNA, 14 bp, Artificial sequence
  Synthetic oligonucleotide
attccttaacccaa

SEQ ID NO: 214 - DNA, 14 bp, Artificial sequence
  Synthetic oligonucleotide
tattccttaaccca

SEQ ID NO: 215 - DNA, 14 bp, Artificial sequence
  Synthetic oligonucleotide
ctattccttaaccc

SEQ ID NO: 216 - DNA, 14 bp, Artificial sequence
  Synthetic oligonucleotide
tctattccttaacc

SEQ ID NO: 217 - DNA, 14 bp, Artificial sequence
  Synthetic oligonucleotide
gtctattccttaac

SEQ ID NO: 218 - DNA, 14 bp, Artificial sequence
  Synthetic oligonucleotide
catcaaatctcata

SEQ ID NO: 219 - DNA, 14 bp, Artificial sequence
  Synthetic oligonucleotide
gcatcaaatctcat

SEQ ID NO: 220 - DNA, 14 bp, Artificial sequence
  Synthetic oligonucleotide
tgcatcaaatctca

SEQ ID NO: 221 - DNA, 14 bp, Artificial sequence
  Synthetic oligonucleotide
atgcatcaaatctc

SEQ ID NO: 222 - DNA, 14 bp, Artificial sequence
  Synthetic oligonucleotide
aatgcatcaaatct

SEQ ID NO: 223 - DNA, 14 bp, Artificial sequence
  Synthetic oligonucleotide
attttaaacaaaca

SEQ ID NO: 224 - DNA, 14 bp, Artificial sequence
  Synthetic oligonucleotide
tattttaaacaaac

SEQ ID NO: 225 - DNA, 14 bp, Artificial sequence
  Synthetic oligonucleotide
ttattttaaacaaa

SEQ ID NO: 226 - DNA, 14 bp, Artificial sequence
  Synthetic oligonucleotide
attattttaaacaa

SEQ ID NO: 227 - DNA, 14 bp, Artificial sequence
  Synthetic oligonucleotide
aattattttaaaca

SEQ ID NO: 228 - DNA, 14 bp, Artificial sequence
  Synthetic oligonucleotide
gaattattttaaac

SEQ ID NO: 229 - DNA, 14 bp, Artificial sequence
  Synthetic oligonucleotide
ttttacaaatctac

SEQ ID NO: 230 - DNA, 14 bp, Artificial sequence
  Synthetic oligonucleotide
attttacaaatcta

SEQ ID NO: 231 - DNA, 14 bp, Artificial sequence
  Synthetic oligonucleotide
tattttacaaatct

SEQ ID NO: 232 - DNA, 14 bp, Artificial sequence
  Synthetic oligonucleotide
ttattttacaaatc

SEQ ID NO: 233 - DNA, 14 bp, Artificial sequence
  Synthetic oligonucleotide
tttattttacaaat

SEQ ID NO: 234 - DNA, 14 bp, Artificial sequence
  Synthetic oligonucleotide
atttattttacaaa

SEQ ID NO: 235 - DNA, 14 bp, Artificial sequence
  Synthetic oligonucleotide
catttattttacaa

SEQ ID NO: 236 - DNA, 14 bp, Artificial sequence
  Synthetic oligonucleotide
acatttattttaca

SEQ ID NO: 237 - DNA, 14 bp, Artificial sequence
  Synthetic oligonucleotide
aacatttattttac

SEQ ID NO: 238 - DNA, 14 bp, Artificial sequence
  Synthetic oligonucleotide
taacatttatttta

SEQ ID NO: 239 - DNA, 14 bp, Artificial sequence
  Synthetic oligonucleotide
aatttaatcattaa

SEQ ID NO: 240 - DNA, 14 bp, Artificial sequence
  Synthetic oligonucleotide
taatttaatcatta

SEQ ID NO: 241 - DNA, 14 bp, Artificial sequence
  Synthetic oligonucleotide
ataatttaatcatt

SEQ ID NO: 242 - DNA, 14 bp, Artificial sequence
  Synthetic oligonucleotide
aataatttaatcat

SEQ ID NO: 243 - DNA, 14 bp, Artificial sequence
  Synthetic oligonucleotide
aaataatttaatca

SEQ ID NO: 244 - DNA, 14 bp, Artificial sequence
  Synthetic oligonucleotide
taaataatttaatc

SEQ ID NO: 245 - DNA, 14 bp, Artificial sequence
  Synthetic oligonucleotide
ctaaataatttaat

SEQ ID NO: 246 - DNA, 14 bp, Artificial sequence
  Synthetic oligonucleotide
cctaaataatttaa

SEQ ID NO: 247 - DNA, 14 bp, Artificial sequence
  Synthetic oligonucleotide
ccctaaataattta

SEQ ID NO: 248 - DNA, 14 bp, Artificial sequence
  Synthetic oligonucleotide
cccctaaataattt

SEQ ID NO: 249 - DNA, 14 bp, Artificial sequence
  Synthetic oligonucleotide
tcccctaaataatt

SEQ ID NO: 250 - DNA, 14 bp, Artificial sequence
  Synthetic oligonucleotide
tatataaaaatcta

SEQ ID NO: 251 - DNA, 14 bp, Artificial sequence
  Synthetic oligonucleotide
ctatataaaaatct

SEQ ID NO: 252 - DNA, 14 bp, Artificial sequence
  Synthetic oligonucleotide
tctatataaaaatc

SEQ ID NO: 253 - DNA, 14 bp, Artificial sequence
  Synthetic oligonucleotide
atctatataaaaat

SEQ ID NO: 254 - DNA, 14 bp, Artificial sequence
  Synthetic oligonucleotide
tatctatataaaaa

SEQ ID NO: 255 - DNA, 14 bp, Artificial sequence
  Synthetic oligonucleotide
ttatctatataaaa

SEQ ID NO: 256 - DNA, 14 bp, Artificial sequence
  Synthetic oligonucleotide
tttatctatataaa

SEQ ID NO: 257 - DNA, 14 bp, Artificial sequence
  Synthetic oligonucleotide
ccccactctaatat

SEQ ID NO: 258 - DNA, 14 bp, Artificial sequence
  Synthetic oligonucleotide
gccccactctaata

SEQ ID NO: 259 - DNA, 14 bp, Artificial sequence
  Synthetic oligonucleotide
tgccccactctaat

SEQ ID NO: 260 - DNA, 14 bp, Artificial sequence
  Synthetic oligonucleotide
atgccccactctaa

SEQ ID NO: 261 - DNA, 14 bp, Artificial sequence
  Synthetic oligonucleotide
aatgccccactcta

SEQ ID NO: 262 - DNA, 14 bp, Artificial sequence
  Synthetic oligonucleotide
aaatgccccactct

SEQ ID NO: 263 - DNA, 14 bp, Artificial sequence
  Synthetic oligonucleotide
taaatgccccactc

SEQ ID NO: 264 - DNA, 14 bp, Artificial sequence
  Synthetic oligonucleotide
ttaaatgccccact

SEQ ID NO: 265 - DNA, 14 bp, Artificial sequence
  Synthetic oligonucleotide
atataaccaccaaa

SEQ ID NO: 266 - DNA, 14 bp, Artificial sequence
  Synthetic oligonucleotide
tatataaccaccaa

SEQ ID NO: 267 - DNA, 14 bp, Artificial sequence
  Synthetic oligonucleotide
atatataaccacca

SEQ ID NO: 268 - DNA, 14 bp, Artificial sequence
  Synthetic oligonucleotide
tatatataaccacc

SEQ ID NO: 269 - DNA, 14 bp, Artificial sequence
  Synthetic oligonucleotide
atatatataaccac

SEQ ID NO: 270 - DNA, 14 bp, Artificial sequence
  Synthetic oligonucleotide
aaaattcactatct

SEQ ID NO: 271 - DNA, 14 bp, Artificial sequence
  Synthetic oligonucleotide
gaaaattcactatc

SEQ ID NO: 272 - DNA, 14 bp, Artificial sequence
  Synthetic oligonucleotide
tgaaaattcactat

SEQ ID NO: 273 - DNA, 14 bp, Artificial sequence
  Synthetic oligonucleotide
ctgaaaattcacta

SEQ ID NO: 274 - DNA, 14 bp, Artificial sequence
  Synthetic oligonucleotide
tctgaaaattcact

SEQ ID NO: 275 - DNA, 14 bp, Artificial sequence
  Synthetic oligonucleotide
tactatatacatct

SEQ ID NO: 276 - DNA, 14 bp, Artificial sequence
  Synthetic oligonucleotide
ctactatatacatc

SEQ ID NO: 277 - DNA, 14 bp, Artificial sequence
  Synthetic oligonucleotide
tctactatatacat

SEQ ID NO: 278 - DNA, 14 bp, Artificial sequence
  Synthetic oligonucleotide
gtctactatataca

SEQ ID NO: 279 - DNA, 14 bp, Artificial sequence
  Synthetic oligonucleotide
agtctactatatac

SEQ ID NO: 280 - DNA, 14 bp, Artificial sequence
  Synthetic oligonucleotide
tagtctactatata

SEQ ID NO: 281 - DNA, 14 bp, Artificial sequence
  Synthetic oligonucleotide
ctagtctactatat

SEQ ID NO: 282 - DNA, 14 bp, Artificial sequence
  Synthetic oligonucleotide
actagtctactata

SEQ ID NO: 283 - DNA, 14 bp, Artificial sequence
  Synthetic oligonucleotide
aactagtctactat

SEQ ID NO: 284 - DNA, 14 bp, Artificial sequence
  Synthetic oligonucleotide
tattctacccataa

SEQ ID NO: 285 - DNA, 14 bp, Artificial sequence
  Synthetic oligonucleotide
atattctacccata

SEQ ID NO: 286 - DNA, 14 bp, Artificial sequence
  Synthetic oligonucleotide
tatattctacccat

SEQ ID NO: 287 - DNA, 14 bp, Artificial sequence
  Synthetic oligonucleotide
gtatattctaccca

SEQ ID NO: 288 - DNA, 14 bp, Artificial sequence
  Synthetic oligonucleotide
tgtatattctaccc

SEQ ID NO: 289 - DNA, 14 bp, Artificial sequence
  Synthetic oligonucleotide
atgtatattctacc

SEQ ID NO: 290 - DNA, 14 bp, Artificial sequence
  Synthetic oligonucleotide
ccacacaattccta

SEQ ID NO: 291 - DNA, 14 bp, Artificial sequence
  Synthetic oligonucleotide
accacacaattcct

SEQ ID NO: 292 - DNA, 14 bp, Artificial sequence
  Synthetic oligonucleotide
aaccacacaattcc

SEQ ID NO: 293 - DNA, 14 bp, Artificial sequence
  Synthetic oligonucleotide
aaaccacacaattc

SEQ ID NO: 294 - DNA, 14 bp, Artificial sequence
  Synthetic oligonucleotide
aaaaccacacaatt

SEQ ID NO: 295 - DNA, 14 bp, Artificial sequence
  Synthetic oligonucleotide
gaaaaccacacaat

SEQ ID NO: 296 - DNA, 14 bp, Artificial sequence
  Synthetic oligonucleotide
agaaaaccacacaa

SEQ ID NO: 297 - DNA, 14 bp, Artificial sequence
  Synthetic oligonucleotide
cagaaaaccacaca

SEQ ID NO: 298 - DNA, 14 bp, Artificial sequence
  Synthetic oligonucleotide
ccagaaaaccacac

SEQ ID NO: 299 - DNA, 14 bp, Artificial sequence
  Synthetic oligonucleotide
tccagaaaaccaca

SEQ ID NO: 300 - DNA, 14 bp, Artificial sequence
  Synthetic oligonucleotide
aaatccataaaaaa

SEQ ID NO: 301 - DNA, 14 bp, Artificial sequence
  Synthetic oligonucleotide
taaatccataaaaa

SEQ ID NO: 302 - DNA, 14 bp, Artificial sequence
  Synthetic oligonucleotide
ctaaatccataaaa

SEQ ID NO: 303 - DNA, 14 bp, Artificial sequence
  Synthetic oligonucleotide
actaaatccataaa

SEQ ID NO: 304 - DNA, 14 bp, Artificial sequence
  Synthetic oligonucleotide
cactaaatccataa

SEQ ID NO: 305 - DNA, 14 bp, Artificial sequence
  Synthetic oligonucleotide
tcactaaatccata

SEQ ID NO: 306 - DNA, 14 bp, Artificial sequence
  Synthetic oligonucleotide
atcactaaatccat

SEQ ID NO: 307 - DNA, 14 bp, Artificial sequence
  Synthetic oligonucleotide
tatcactaaatcca

SEQ ID NO: 308 - DNA, 14 bp, Artificial sequence
  Synthetic oligonucleotide
atatcactaaatcc

SEQ ID NO: 309 - DNA, 14 bp, Artificial sequence
  Synthetic oligonucleotide
tatatcactaaatc

SEQ ID NO: 310 - DNA, 14 bp, Artificial sequence
  Synthetic oligonucleotide
atatatcactaaat

SEQ ID NO: 311 - DNA, 14 bp, Artificial sequence
  Synthetic oligonucleotide
gatatatcactaaa

SEQ ID NO: 312 - DNA, 14 bp, Artificial sequence
  Synthetic oligonucleotide
agatatatcactaa

SEQ ID NO: 313 - DNA, 14 bp, Artificial sequence
  Synthetic oligonucleotide
tagatatatcacta

SEQ ID NO: 314 - DNA, 14 bp, Artificial sequence
  Synthetic oligonucleotide
tataaatttctcta

SEQ ID NO: 315 - DNA, 14 bp, Artificial sequence
  Synthetic oligonucleotide
atataaatttctct

SEQ ID NO: 316 - DNA, 14 bp, Artificial sequence
  Synthetic oligonucleotide
tatataaatttctc

SEQ ID NO: 317 - DNA, 14 bp, Artificial sequence
  Synthetic oligonucleotide
atatataaatttct

SEQ ID NO: 318 - DNA, 14 bp, Artificial sequence
  Synthetic oligonucleotide
catatataaatttc

SEQ ID NO: 319 - DNA, 14 bp, Artificial sequence
  Synthetic oligonucleotide
tcatatataaattt

SEQ ID NO: 320 - DNA, 14 bp, Artificial sequence
  Synthetic oligonucleotide
ctccattccaaatt

SEQ ID NO: 321 - DNA, 14 bp, Artificial sequence
  Synthetic oligonucleotide
actccattccaaat

SEQ ID NO: 322 - DNA, 14 bp, Artificial sequence
  Synthetic oligonucleotide
cactccattccaaa

SEQ ID NO: 323 - DNA, 14 bp, Artificial sequence
  Synthetic oligonucleotide
ccactccattccaa

SEQ ID NO: 324 - DNA, 14 bp, Artificial sequence
  Synthetic oligonucleotide
accactccattcca

SEQ ID NO: 325 - DNA, 14 bp, Artificial sequence
  Synthetic oligonucleotide
aaccactccattcc

SEQ ID NO: 326 - DNA, 14 bp, Artificial sequence
  Synthetic oligonucleotide
aaaccactccattc

SEQ ID NO: 327 - DNA, 14 bp, Artificial sequence
  Synthetic oligonucleotide
tcacacaaccatat

SEQ ID NO: 328 - DNA, 14 bp, Artificial sequence
  Synthetic oligonucleotide
atcacacaaccata

SEQ ID NO: 329 - DNA, 14 bp, Artificial sequence
  Synthetic oligonucleotide
gatcacacaaccat

SEQ ID NO: 330 - DNA, 14 bp, Artificial sequence
  Synthetic oligonucleotide
agatcacacaacca

SEQ ID NO: 331 - DNA, 14 bp, Artificial sequence
  Synthetic oligonucleotide
aagatcacacaacc

SEQ ID NO: 332 - DNA, 14 bp, Artificial sequence
  Synthetic oligonucleotide
aaagatcacacaac

SEQ ID NO: 333 - DNA, 14 bp, Artificial sequence
  Synthetic oligonucleotide
aaaagatcacacaa

SEQ ID NO: 334 - DNA, 14 bp, Artificial sequence
  Synthetic oligonucleotide
taaaagatcacaca

SEQ ID NO: 335 - DNA, 14 bp, Artificial sequence
  Synthetic oligonucleotide
ttcatttctaaaaa

SEQ ID NO: 336 - DNA, 14 bp, Artificial sequence
  Synthetic oligonucleotide
tttcatttctaaaa

SEQ ID NO: 337 - DNA, 14 bp, Artificial sequence
  Synthetic oligonucleotide
ctttcatttctaaa

SEQ ID NO: 338 - DNA, 14 bp, Artificial sequence
  Synthetic oligonucleotide
tctttcatttctaa

SEQ ID NO: 339 - DNA, 14 bp, Artificial sequence
  Synthetic oligonucleotide
atctttcatttcta

SEQ ID NO: 340 - DNA, 14 bp, Artificial sequence
  Synthetic oligonucleotide
gatctttcatttct

SEQ ID NO: 341 - DNA, 14 bp, Artificial sequence
  Synthetic oligonucleotide
tgatctttcatttc

SEQ ID NO: 342 - DNA, 14 bp, Artificial sequence
  Synthetic oligonucleotide
atgatctttcattt

SEQ ID NO: 343 - DNA, 14 bp, Artificial sequence
  Synthetic oligonucleotide
ataaaaacccactt

SEQ ID NO: 344 - DNA, 14 bp, Artificial sequence
  Synthetic oligonucleotide
cataaaaacccact

SEQ ID NO: 345 - DNA, 14 bp, Artificial sequence
  Synthetic oligonucleotide
acataaaaacccac

SEQ ID NO: 346 - DNA, 14 bp, Artificial sequence
  Synthetic oligonucleotide
cacataaaaaccca

SEQ ID NO: 347 - DNA, 14 bp, Artificial sequence
  Synthetic oligonucleotide
tcacataaaaaccc

SEQ ID NO: 348 - DNA, 14 bp, Artificial sequence
  Synthetic oligonucleotide
atcacataaaaacc

SEQ ID NO: 349 - DNA, 14 bp, Artificial sequence
  Synthetic oligonucleotide
catcacataaaaac

SEQ ID NO: 350 - DNA, 14 bp, Artificial sequence
  Synthetic oligonucleotide
tcatcacataaaaa

SEQ ID NO: 351 - DNA, 14 bp, Artificial sequence
  Synthetic oligonucleotide
gtcatcacataaaa

SEQ ID NO: 352 - DNA, 14 bp, Artificial sequence
  Synthetic oligonucleotide
agtcatcacataaa

SEQ ID NO: 353 - DNA, 14 bp, Artificial sequence
  Synthetic oligonucleotide
tagtcatcacataa

SEQ ID NO: 354 - DNA, 14 bp, Artificial sequence
  Synthetic oligonucleotide
atagtcatcacata

SEQ ID NO: 355 - DNA, 14 bp, Artificial sequence
  Synthetic oligonucleotide
catagtcatcacat

SEQ ID NO: 356 - DNA, 14 bp, Artificial sequence
  Synthetic oligonucleotide
taaatacaaatcta

SEQ ID NO: 357 - DNA, 14 bp, Artificial sequence
  Synthetic oligonucleotide
ctaaatacaaatct

SEQ ID NO: 358 - DNA, 14 bp, Artificial sequence
  Synthetic oligonucleotide
gctaaatacaaatc

SEQ ID NO: 359 - DNA, 14 bp, Artificial sequence
  Synthetic oligonucleotide
tgctaaatacaaat

SEQ ID NO: 360 - DNA, 14 bp, Artificial sequence
  Synthetic oligonucleotide
atgctaaatacaaa

SEQ ID NO: 361 - DNA, 14 bp, Artificial sequence
  Synthetic oligonucleotide
tatgctaaatacaa

SEQ ID NO: 362 - DNA, 14 bp, Artificial sequence
  Synthetic oligonucleotide
aatcttacactaaa

SEQ ID NO: 363 - DNA, 14 bp, Artificial sequence
  Synthetic oligonucleotide
taatcttacactaa

SEQ ID NO: 364 - DNA, 14 bp, Artificial sequence
  Synthetic oligonucleotide
ataatcttacacta

SEQ ID NO: 365 - DNA, 14 bp, Artificial sequence
  Synthetic oligonucleotide
aataatcttacact

SEQ ID NO: 366 - DNA, 14 bp, Artificial sequence
  Synthetic oligonucleotide
gaataatcttacac

SEQ ID NO: 367 - DNA, 14 bp, Artificial sequence
  Synthetic oligonucleotide
tgaataatcttaca

SEQ ID NO: 368 - DNA, 14 bp, Artificial sequence
  Synthetic oligonucleotide
atgaataatcttac

SEQ ID NO: 369 - DNA, 14 bp, Artificial sequence
  Synthetic oligonucleotide
caaaattctaataa

SEQ ID NO: 370 - DNA, 14 bp, Artificial sequence
  Synthetic oligonucleotide
tcaaaattctaata

SEQ ID NO: 371 - DNA, 14 bp, Artificial sequence
  Synthetic oligonucleotide
ttcaaaattctaat

SEQ ID NO: 372 - DNA, 14 bp, Artificial sequence
  Synthetic oligonucleotide
attcaaaattctaa

SEQ ID NO: 373 - DNA, 14 bp, Artificial sequence
  Synthetic oligonucleotide
gattcaaaattcta

SEQ ID NO: 374 - DNA, 14 bp, Artificial sequence
  Synthetic oligonucleotide
agattcaaaattct

SEQ ID NO: 375 - DNA, 14 bp, Artificial sequence
  Synthetic oligonucleotide
attactacaaccaa

SEQ ID NO: 376 - DNA, 14 bp, Artificial sequence
  Synthetic oligonucleotide
cattactacaacca

SEQ ID NO: 377 - DNA, 14 bp, Artificial sequence
  Synthetic oligonucleotide
ccattactacaacc

SEQ ID NO: 378 - DNA, 14 bp, Artificial sequence
  Synthetic oligonucleotide
accattactacaac

SEQ ID NO: 379 - DNA, 14 bp, Artificial sequence
  Synthetic oligonucleotide
aaccattactacaa

SEQ ID NO: 380 - DNA, 14 bp, Artificial sequence
  Synthetic oligonucleotide
aaaccattactaca

SEQ ID NO: 381 - DNA, 14 bp, Artificial sequence
  Synthetic oligonucleotide
gaaaccattactac

SEQ ID NO: 382 - DNA, 14 bp, Artificial sequence
  Synthetic oligonucleotide
tgaaaccattacta

SEQ ID NO: 383 - DNA, 14 bp, Artificial sequence
  Synthetic oligonucleotide
atgaaaccattact

SEQ ID NO: 384 - DNA, 14 bp, Artificial sequence
  Synthetic oligonucleotide
atttttaaaaacac

SEQ ID NO: 385 - DNA, 14 bp, Artificial sequence
  Synthetic oligonucleotide
aatttttaaaaaca

SEQ ID NO: 386 - DNA, 14 bp, Artificial sequence
  Synthetic oligonucleotide
taatttttaaaaac

SEQ ID NO: 387 - DNA, 14 bp, Artificial sequence
  Synthetic oligonucleotide
ataatttttaaaaa

SEQ ID NO: 388 - DNA, 14 bp, Artificial sequence
  Synthetic oligonucleotide
cataatttttaaaa

SEQ ID NO: 389 - DNA, 14 bp, Artificial sequence
  Synthetic oligonucleotide
tcataatttttaaa

SEQ ID NO: 390 - DNA, 14 bp, Artificial sequence
  Synthetic oligonucleotide
atcataatttttaa

SEQ ID NO: 391 - DNA, 14 bp, Artificial sequence
  Synthetic oligonucleotide
ctttatacaaaaaa

SEQ ID NO: 392 - DNA, 14 bp, Artificial sequence
  Synthetic oligonucleotide
actttatacaaaaa

SEQ ID NO: 393 - DNA, 14 bp, Artificial sequence
  Synthetic oligonucleotide
tactttatacaaaa

SEQ ID NO: 394 - DNA, 14 bp, Artificial sequence
  Synthetic oligonucleotide
ttactttatacaaa

SEQ ID NO: 395 - DNA, 14 bp, Artificial sequence
  Synthetic oligonucleotide
cttactttatacaa

SEQ ID NO: 396 - DNA, 14 bp, Artificial sequence
  Synthetic oligonucleotide
gcttactttataca

SEQ ID NO: 397 - DNA, 14 bp, Artificial sequence
  Synthetic oligonucleotide
tgcttactttatac

SEQ ID NO: 398 - DNA, 14 bp, Artificial sequence
  Synthetic oligonucleotide
tctcaaaataataa

SEQ ID NO: 399 - DNA, 14 bp, Artificial sequence
  Synthetic oligonucleotide
ctctcaaaataata

SEQ ID NO: 400 - DNA, 14 bp, Artificial sequence
  Synthetic oligonucleotide
tctctcaaaataat

SEQ ID NO: 401 - DNA, 14 bp, Artificial sequence
  Synthetic oligonucleotide
atctctcaaaataa

SEQ ID NO: 402 - DNA, 14 bp, Artificial sequence
  Synthetic oligonucleotide
aatctctcaaaata

SEQ ID NO: 403 - DNA, 14 bp, Artificial sequence
  Synthetic oligonucleotide
aaatctctcaaaat

SEQ ID NO: 404 - DNA, 14 bp, Artificial sequence
  Synthetic oligonucleotide
taaatctctcaaaa

SEQ ID NO: 405 - DNA, 14 bp, Artificial sequence
  Synthetic oligonucleotide
ttaaatctctcaaa

SEQ ID NO: 406 - DNA, 14 bp, Artificial sequence
  Synthetic oligonucleotide
tttaaatctctcaa

SEQ ID NO: 407 - DNA, 14 bp, Artificial sequence
  Synthetic oligonucleotide
ttttaaatctctca

SEQ ID NO: 408 - DNA, 14 bp, Artificial sequence
  Synthetic oligonucleotide
taatactttttcca

SEQ ID NO: 409 - DNA, 14 bp, Artificial sequence
  Synthetic oligonucleotide
ttaatactttttcc

SEQ ID NO: 410 - DNA, 14 bp, Artificial sequence
  Synthetic oligonucleotide
gttaatactttttc

SEQ ID NO: 411 - DNA, 14 bp, Artificial sequence
  Synthetic oligonucleotide
tgttaatacttttt

SEQ ID NO: 412 - DNA, 14 bp, Artificial sequence
  Synthetic oligonucleotide
atgttaatactttt

SEQ ID NO: 413 - DNA, 14 bp, Artificial sequence
  Synthetic oligonucleotide
ttatcactaccaca

SEQ ID NO: 414 - DNA, 14 bp, Artificial sequence
  Synthetic oligonucleotide
tttatcactaccac

SEQ ID NO: 415 - DNA, 14 bp, Artificial sequence
  Synthetic oligonucleotide
atttatcactacca

SEQ ID NO: 416 - DNA, 14 bp, Artificial sequence
  Synthetic oligonucleotide
catttatcactacc

SEQ ID NO: 417 - DNA, 14 bp, Artificial sequence
  Synthetic oligonucleotide
tcatttatcactac

SEQ ID NO: 418 - DNA, 14 bp, Artificial sequence
  Synthetic oligonucleotide
atcatttatcacta

SEQ ID NO: 419 - DNA, 14 bp, Artificial sequence
  Synthetic oligonucleotide
catcatttatcact

SEQ ID NO: 420 - DNA, 14 bp, Artificial sequence
  Synthetic oligonucleotide
acatcatttatcac

SEQ ID NO: 421 - DNA, 14 bp, Artificial sequence
  Synthetic oligonucleotide
aacatcatttatca

SEQ ID NO: 422 - DNA, 14 bp, Artificial sequence
  Synthetic oligonucleotide
taacatcatttatc

SEQ ID NO: 423 - DNA, 14 bp, Artificial sequence
  Synthetic oligonucleotide
ttaacatcatttat

SEQ ID NO: 424 - DNA, 14 bp, Artificial sequence
  Synthetic oligonucleotide
attaacatcattta

SEQ ID NO: 425 - DNA, 14 bp, Artificial sequence
  Synthetic oligonucleotide
aattaacatcattt

SEQ ID NO: 426 - DNA, 14 bp, Artificial sequence
  Synthetic oligonucleotide
taattaacatcatt

SEQ ID NO: 427 - DNA, 14 bp, Artificial sequence
  Synthetic oligonucleotide
ctaattaacatcat

SEQ ID NO: 428 - DNA, 14 bp, Artificial sequence
  Synthetic oligonucleotide
cctaattaacatca

SEQ ID NO: 429 - DNA, 14 bp, Artificial sequence
  Synthetic oligonucleotide
ccctaattaacatc

SEQ ID NO: 430 - DNA, 14 bp, Artificial sequence
  Synthetic oligonucleotide
gccctaattaacat

SEQ ID NO: 431 - DNA, 14 bp, Artificial sequence
  Synthetic oligonucleotide
ggccctaattaaca

SEQ ID NO: 432 - DNA, 14 bp, Artificial sequence
  Synthetic oligonucleotide
cggccctaattaac

SEQ ID NO: 433 - DNA, 14 bp, Artificial sequence
  Synthetic oligonucleotide
aaacacattttttt

SEQ ID NO: 434 - DNA, 14 bp, Artificial sequence
  Synthetic oligonucleotide
taaacacatttttt

SEQ ID NO: 435 - DNA, 14 bp, Artificial sequence
  Synthetic oligonucleotide
ataaacacattttt

SEQ ID NO: 436 - DNA, 14 bp, Artificial sequence
  Synthetic oligonucleotide
tataaacacatttt

SEQ ID NO: 437 - DNA, 14 bp, Artificial sequence
  Synthetic oligonucleotide
atataaacacattt

SEQ ID NO: 438 - DNA, 14 bp, Artificial sequence
  Synthetic oligonucleotide
catataaacacatt

SEQ ID NO: 439 - DNA, 14 bp, Artificial sequence
  Synthetic oligonucleotide
acatataaacacat

SEQ ID NO: 440 - DNA, 14 bp, Artificial sequence
  Synthetic oligonucleotide
aacatataaacaca

SEQ ID NO: 441 - DNA, 14 bp, Artificial sequence
  Synthetic oligonucleotide
taacatataaacac

SEQ ID NO: 442 - DNA, 14 bp, Artificial sequence
  Synthetic oligonucleotide
ataacatataaaca

SEQ ID NO: 443 - DNA, 14 bp, Artificial sequence
  Synthetic oligonucleotide
tataacatataaac

SEQ ID NO: 444 - DNA, 14 bp, Artificial sequence
  Synthetic oligonucleotide
atataacatataaa

SEQ ID NO: 445 - DNA, 14 bp, Artificial sequence
  Synthetic oligonucleotide
catataacatataa

SEQ ID NO: 446 - DNA, 14 bp, Artificial sequence
  Synthetic oligonucleotide
acatataacatata

SEQ ID NO: 447 - DNA, 14 bp, Artificial sequence
  Synthetic oligonucleotide
cacatataacatat

SEQ ID NO: 448 - DNA, 14 bp, Artificial sequence
  Synthetic oligonucleotide
tcacatataacata

SEQ ID NO: 449 - DNA, 14 bp, Artificial sequence
  Synthetic oligonucleotide
atcacatataacat

SEQ ID NO: 450 - DNA, 14 bp, Artificial sequence
  Synthetic oligonucleotide
tatcacatataaca

SEQ ID NO: 451 - DNA, 14 bp, Artificial sequence
  Synthetic oligonucleotide
ctatcacatataac

SEQ ID NO: 452 - DNA, 14 bp, Artificial sequence
  Synthetic oligonucleotide
actatcacatataa

SEQ ID NO: 453 - DNA, 14 bp, Artificial sequence
  Synthetic oligonucleotide
cactatcacatata

SEQ ID NO: 454 - DNA, 14 bp, Artificial sequence
  Synthetic oligonucleotide
gtccaacataactc

SEQ ID NO: 455 - DNA, 14 bp, Artificial sequence
  Synthetic oligonucleotide
agtccaacataact

SEQ ID NO: 456 - DNA, 14 bp, Artificial sequence
  Synthetic oligonucleotide
cagtccaacataac

SEQ ID NO: 457 - DNA, 14 bp, Artificial sequence
  Synthetic oligonucleotide
tcagtccaacataa

SEQ ID NO: 458 - DNA, 14 bp, Artificial sequence
  Synthetic oligonucleotide
atcagtccaacata

SEQ ID NO: 459 - DNA, 14 bp, Artificial sequence
  Synthetic oligonucleotide
tatcagtccaacat

SEQ ID NO: 460 - DNA, 14 bp, Artificial sequence
  Synthetic oligonucleotide
aaaccctcccaaaa

SEQ ID NO: 461 - DNA, 14 bp, Artificial sequence
  Synthetic oligonucleotide
taaaccctcccaaa

SEQ ID NO: 462 - DNA, 14 bp, Artificial sequence
  Synthetic oligonucleotide
ttaaaccctcccaa

SEQ ID NO: 463 - DNA, 14 bp, Artificial sequence
  Synthetic oligonucleotide
attaaaccctccca

SEQ ID NO: 464 - DNA, 14 bp, Artificial sequence
  Synthetic oligonucleotide
cattaaaccctccc

SEQ ID NO: 465 - DNA, 14 bp, Artificial sequence
  Synthetic oligonucleotide
acattaaaccctcc

SEQ ID NO: 466 - DNA, 14 bp, Artificial sequence
  Synthetic oligonucleotide
aacattaaaccctc

SEQ ID NO: 467 - DNA, 14 bp, Artificial sequence
  Synthetic oligonucleotide
aaacattaaaccct

SEQ ID NO: 468 - DNA, 14 bp, Artificial sequence
  Synthetic oligonucleotide
taaacattaaaccc

SEQ ID NO: 469 - DNA, 14 bp, Artificial sequence
  Synthetic oligonucleotide
ataaacattaaacc

SEQ ID NO: 470 - DNA, 14 bp, Artificial sequence
  Synthetic oligonucleotide
tataaacattaaac

SEQ ID NO: 471 - DNA, 14 bp, Artificial sequence
  Synthetic oligonucleotide
ctataaacattaaa

SEQ ID NO: 472 - DNA, 14 bp, Artificial sequence
  Synthetic oligonucleotide
actataaacattaa

SEQ ID NO: 473 - DNA, 14 bp, Artificial sequence
  Synthetic oligonucleotide
aactataaacatta

SEQ ID NO: 474 - DNA, 14 bp, Artificial sequence
  Synthetic oligonucleotide
aaactataaacatt

SEQ ID NO: 475 - DNA, 14 bp, Artificial sequence
  Synthetic oligonucleotide
taaactataaacat

SEQ ID NO: 476 - DNA, 14 bp, Artificial sequence
  Synthetic oligonucleotide
ttaaactataaaca

SEQ ID NO: 477 - DNA, 14 bp, Artificial sequence
  Synthetic oligonucleotide
tttaaactataaac

SEQ ID NO: 478 - DNA, 14 bp, Artificial sequence
  Synthetic oligonucleotide
ctttaaactataaa

SEQ ID NO: 479 - DNA, 14 bp, Artificial sequence
  Synthetic oligonucleotide
gctttaaactataa

SEQ ID NO: 480 - DNA, 14 bp, Artificial sequence
  Synthetic oligonucleotide
tgctttaaactata

SEQ ID NO: 481 - DNA, 14 bp, Artificial sequence
  Synthetic oligonucleotide
cagcctatcaccac

SEQ ID NO: 482 - DNA, 14 bp, Artificial sequence
  Synthetic oligonucleotide
acagcctatcacca

SEQ ID NO: 483 - DNA, 14 bp, Artificial sequence
  Synthetic oligonucleotide
cacagcctatcacc

SEQ ID NO: 484 - DNA, 14 bp, Artificial sequence
  Synthetic oligonucleotide
tcacagcctatcac

SEQ ID NO: 485 - DNA, 14 bp, Artificial sequence
  Synthetic oligonucleotide
atcacagcctatca

SEQ ID NO: 486 - DNA, 14 bp, Artificial sequence
  Synthetic oligonucleotide
aatcacagcctatc

SEQ ID NO: 487 - DNA, 14 bp, Artificial sequence
  Synthetic oligonucleotide
aaatcacagcctat

SEQ ID NO: 488 - DNA, 14 bp, Artificial sequence
  Synthetic oligonucleotide
caaatcacagccta

SEQ ID NO: 489 - DNA, 14 bp, Artificial sequence
  Synthetic oligonucleotide
ccaaatcacagcct

SEQ ID NO: 490 - DNA, 14 bp, Artificial sequence
  Synthetic oligonucleotide
cccaaatcacagcc

SEQ ID NO: 491 - DNA, 14 bp, Artificial sequence
  Synthetic oligonucleotide
acccaaatcacagc

SEQ ID NO: 492 - DNA, 14 bp, Artificial sequence
  Synthetic oligonucleotide
cacccaaatcacag

SEQ ID NO: 493 - DNA, 14 bp, Artificial sequence
  Synthetic oligonucleotide
tcacccaaatcaca

SEQ ID NO: 494 - DNA, 14 bp, Artificial sequence
  Synthetic oligonucleotide
gtcacccaaatcac

SEQ ID NO: 495 - DNA, 14 bp, Artificial sequence
  Synthetic oligonucleotide
cgtcacccaaatca

SEQ ID NO: 496 - DNA, 14 bp, Artificial sequence
  Synthetic oligonucleotide
gcgtcacccaaatc

SEQ ID NO: 497 - DNA, 14 bp, Artificial sequence
  Synthetic oligonucleotide
agcgtcacccaaat

SEQ ID NO: 498 - DNA, 14 bp, Artificial sequence
  Synthetic oligonucleotide
atcctaaaatcact

SEQ ID NO: 499 - DNA, 14 bp, Artificial sequence
  Synthetic oligonucleotide
gatcctaaaatcac

SEQ ID NO: 500 - DNA, 14 bp, Artificial sequence
  Synthetic oligonucleotide
agatcctaaaatca

SEQ ID NO: 501 - DNA, 14 bp, Artificial sequence
  Synthetic oligonucleotide
cagatcctaaaatc

SEQ ID NO: 502 - DNA, 14 bp, Artificial sequence
  Synthetic oligonucleotide
tcagatcctaaaat

SEQ ID NO: 503 - DNA, 14 bp, Artificial sequence
  Synthetic oligonucleotide
aaaccaatcatcat

SEQ ID NO: 504 - DNA, 14 bp, Artificial sequence
  Synthetic oligonucleotide
aaaaccaatcatca

SEQ ID NO: 505 - DNA, 14 bp, Artificial sequence
  Synthetic oligonucleotide
taaaaccaatcatc

SEQ ID NO: 506 - DNA, 14 bp, Artificial sequence
  Synthetic oligonucleotide
gtaaaaccaatcat

SEQ ID NO: 507 - DNA, 14 bp, Artificial sequence
  Synthetic oligonucleotide
agtaaaaccaatca

SEQ ID NO: 508 - DNA, 14 bp, Artificial sequence
  Synthetic oligonucleotide
aagtaaaaccaatc

SEQ ID NO: 509 - DNA, 14 bp, Artificial sequence
  Synthetic oligonucleotide
aaagtaaaaccaat

SEQ ID NO: 510 - DNA, 14 bp, Artificial sequence
  Synthetic oligonucleotide
catctctactaaaa

SEQ ID NO: 511 - DNA, 14 bp, Artificial sequence
  Synthetic oligonucleotide
ccatctctactaaa

SEQ ID NO: 512 - DNA, 14 bp, Artificial sequence
  Synthetic oligonucleotide
tccatctctactaa

SEQ ID NO: 513 - DNA, 14 bp, Artificial sequence
  Synthetic oligonucleotide
ttccatctctacta

SEQ ID NO: 514 - DNA, 14 bp, Artificial sequence
  Synthetic oligonucleotide
cttccatctctact

SEQ ID NO: 515 - DNA, 14 bp, Artificial sequence
  Synthetic oligonucleotide
ccttccatctctac

SEQ ID NO: 516 - DNA, 14 bp, Artificial sequence
  Synthetic oligonucleotide
cccttccatctcta

SEQ ID NO: 517 - DNA, 14 bp, Artificial sequence
  Synthetic oligonucleotide
acataacaaaccca

SEQ ID NO: 518 - DNA, 14 bp, Artificial sequence
  Synthetic oligonucleotide
tacataacaaaccc

SEQ ID NO: 519 - DNA, 14 bp, Artificial sequence
  Synthetic oligonucleotide
ctacataacaaacc

SEQ ID NO: 520 - DNA, 14 bp, Artificial sequence
  Synthetic oligonucleotide
actacataacaaac

SEQ ID NO: 521 - DNA, 14 bp, Artificial sequence
  Synthetic oligonucleotide
aactacataacaaa

SEQ ID NO: 522 - DNA, 14 bp, Artificial sequence
  Synthetic oligonucleotide
taactacataacaa

SEQ ID NO: 523 - DNA, 14 bp, Artificial sequence
  Synthetic oligonucleotide
ataactacataaca

SEQ ID NO: 524 - DNA, 14 bp, Artificial sequence
  Synthetic oligonucleotide
aataactacataac

SEQ ID NO: 525 - DNA, 14 bp, Artificial sequence
  Synthetic oligonucleotide
caataactacataa

SEQ ID NO: 526 - DNA, 14 bp, Artificial sequence
  Synthetic oligonucleotide
acaataactacata

SEQ ID NO: 527 - DNA, 14 bp, Artificial sequence
  Synthetic oligonucleotide
cacaataactacat

SEQ ID NO: 528 - DNA, 14 bp, Artificial sequence
  Synthetic oligonucleotide
tcacaataactaca

SEQ ID NO: 529 - DNA, 14 bp, Artificial sequence
  Synthetic oligonucleotide
ttcacaataactac

SEQ ID NO: 530 - DNA, 14 bp, Artificial sequence
  Synthetic oligonucleotide
attcacaataacta

SEQ ID NO: 531 - DNA, 14 bp, Artificial sequence
  Synthetic oligonucleotide
aattcacaataact

SEQ ID NO: 532 - DNA, 14 bp, Artificial sequence
  Synthetic oligonucleotide
gaattcacaataac

SEQ ID NO: 533 - DNA, 14 bp, Artificial sequence
  Synthetic oligonucleotide
tgaattcacaataa

SEQ ID NO: 534 - DNA, 14 bp, Artificial sequence
  Synthetic oligonucleotide
ctaaaacaatctaa

SEQ ID NO: 535 - DNA, 14 bp, Artificial sequence
  Synthetic oligonucleotide
cctaaaacaatcta

SEQ ID NO: 536 - DNA, 14 bp, Artificial sequence
  Synthetic oligonucleotide
acctaaaacaatct

SEQ ID NO: 537 - DNA, 14 bp, Artificial sequence
  Synthetic oligonucleotide
tacctaaaacaatc

SEQ ID NO: 538 - DNA, 14 bp, Artificial sequence
  Synthetic oligonucleotide
atacctaaaacaat

SEQ ID NO: 539 - DNA, 14 bp, Artificial sequence
  Synthetic oligonucleotide
tatacctaaaacaa

SEQ ID NO: 540 - DNA, 14 bp, Artificial sequence
  Synthetic oligonucleotide
ctatacctaaaaca

SEQ ID NO: 541 - DNA, 14 bp, Artificial sequence
  Synthetic oligonucleotide
gctatacctaaaac

SEQ ID NO: 542 - DNA, 14 bp, Artificial sequence
  Synthetic oligonucleotide
ttgtaactaaaaat

SEQ ID NO: 543 - DNA, 14 bp, Artificial sequence
  Synthetic oligonucleotide
cttgtaactaaaaa

SEQ ID NO: 544 - DNA, 14 bp, Artificial sequence
  Synthetic oligonucleotide
ccttgtaactaaaa

SEQ ID NO: 545 - DNA, 14 bp, Artificial sequence
  Synthetic oligonucleotide
cccttgtaactaaa

SEQ ID NO: 546 - DNA, 14 bp, Artificial sequence
  Synthetic oligonucleotide
ccccttgtaactaa

SEQ ID NO: 547 - DNA, 14 bp, Artificial sequence
  Synthetic oligonucleotide
accccttgtaacta

SEQ ID NO: 548 - DNA, 14 bp, Artificial sequence
  Synthetic oligonucleotide
caccccttgtaact

SEQ ID NO: 549 - DNA, 14 bp, Artificial sequence
  Synthetic oligonucleotide
acaccccttgtaac

SEQ ID NO: 550 - DNA, 14 bp, Artificial sequence
  Synthetic oligonucleotide
ttcatatatacatc

SEQ ID NO: 551 - DNA, 14 bp, Artificial sequence
  Synthetic oligonucleotide
cttcatatatacat

SEQ ID NO: 552 - DNA, 14 bp, Artificial sequence
  Synthetic oligonucleotide
ccttcatatataca

SEQ ID NO: 553 - DNA, 14 bp, Artificial sequence
  Synthetic oligonucleotide
cccttcatatatac

SEQ ID NO: 554 - DNA, 14 bp, Artificial sequence
  Synthetic oligonucleotide
acccttcatatata

SEQ ID NO: 555 - DNA, 14 bp, Artificial sequence
  Synthetic oligonucleotide
tacccttcatatat

SEQ ID NO: 556 - DNA, 14 bp, Artificial sequence
  Synthetic oligonucleotide
ttacccttcatata

SEQ ID NO: 557 - DNA, 14 bp, Artificial sequence
  Synthetic oligonucleotide
attacccttcatat

SEQ ID NO: 558 - DNA, 14 bp, Artificial sequence
  Synthetic oligonucleotide
cattacccttcata

SEQ ID NO: 559 - DNA, 14 bp, Artificial sequence
  Synthetic oligonucleotide
acattacccttcat

SEQ ID NO: 560 - DNA, 14 bp, Artificial sequence
  Synthetic oligonucleotide
tacattacccttca

SEQ ID NO: 561 - DNA, 14 bp, Artificial sequence
  Synthetic oligonucleotide
tcttatacttacta

SEQ ID NO: 562 - DNA, 14 bp, Artificial sequence
  Synthetic oligonucleotide
ttcttatacttact

SEQ ID NO: 563 - DNA, 14 bp, Artificial sequence
  Synthetic oligonucleotide
attcttatacttac

SEQ ID NO: 564 - DNA, 14 bp, Artificial sequence
  Synthetic oligonucleotide
gattcttatactta

SEQ ID NO: 565 - DNA, 14 bp, Artificial sequence
  Synthetic oligonucleotide
tgattcttatactt

SEQ ID NO: 566 - DNA, 14 bp, Artificial sequence
  Synthetic oligonucleotide
atgattcttatact

SEQ ID NO: 567 - DNA, 14 bp, Artificial sequence
  Synthetic oligonucleotide
aacttcactaaaat

SEQ ID NO: 568 - DNA, 14 bp, Artificial sequence
  Synthetic oligonucleotide
aaacttcactaaaa

SEQ ID NO: 569 - DNA, 14 bp, Artificial sequence
  Synthetic oligonucleotide
taaacttcactaaa

SEQ ID NO: 570 - DNA, 14 bp, Artificial sequence
  Synthetic oligonucleotide
ataaacttcactaa

SEQ ID NO: 571 - DNA, 14 bp, Artificial sequence
  Synthetic oligonucleotide
aataaacttcacta

SEQ ID NO: 572 - DNA, 14 bp, Artificial sequence
  Synthetic oligonucleotide
taataaacttcact

SEQ ID NO: 573 - DNA, 14 bp, Artificial sequence
  Synthetic oligonucleotide
ctaataaacttcac

SEQ ID NO: 574 - DNA, 14 bp, Artificial sequence
  Synthetic oligonucleotide
actaataaacttca

SEQ ID NO: 575 - DNA, 14 bp, Artificial sequence
  Synthetic oligonucleotide
aactaataaacttc

SEQ ID NO: 576 - DNA, 14 bp, Artificial sequence
  Synthetic oligonucleotide
aatcttctatttta

SEQ ID NO: 577 - DNA, 14 bp, Artificial sequence
  Synthetic oligonucleotide
caatcttctatttt

SEQ ID NO: 578 - DNA, 14 bp, Artificial sequence
  Synthetic oligonucleotide
ccaatcttctattt

SEQ ID NO: 579 - DNA, 14 bp, Artificial sequence
  Synthetic oligonucleotide
accaatcttctatt

SEQ ID NO: 580 - DNA, 14 bp, Artificial sequence
  Synthetic oligonucleotide
aaccaatcttctat

SEQ ID NO: 581 - DNA, 14 bp, Artificial sequence
  Synthetic oligonucleotide
caaccaatcttcta

SEQ ID NO: 582 - DNA, 14 bp, Artificial sequence
  Synthetic oligonucleotide
gcaaccaatcttct

SEQ ID NO: 583 - DNA, 14 bp, Artificial sequence
  Synthetic oligonucleotide
tgcaaccaatcttc

SEQ ID NO: 584 - DNA, 14 bp, Artificial sequence
  Synthetic oligonucleotide
ctgcaaccaatctt

SEQ ID NO: 585 - DNA, 14 bp, Artificial sequence
  Synthetic oligonucleotide
actgcaaccaatct

SEQ ID NO: 586 - DNA, 14 bp, Artificial sequence
  Synthetic oligonucleotide
aactgcaaccaatc

SEQ ID NO: 587 - DNA, 14 bp, Artificial sequence
  Synthetic oligonucleotide
taactgcaaccaat

SEQ ID NO: 588 - DNA, 14 bp, Artificial sequence
  Synthetic oligonucleotide
tacaacacacatca

SEQ ID NO: 589 - DNA, 14 bp, Artificial sequence
  Synthetic oligonucleotide
atacaacacacatc

SEQ ID NO: 590 - DNA, 14 bp, Artificial sequence
  Synthetic oligonucleotide
aatacaacacacat

SEQ ID NO: 591 - DNA, 14 bp, Artificial sequence
  Synthetic oligonucleotide
gaatacaacacaca

SEQ ID NO: 592 - DNA, 14 bp, Artificial sequence
  Synthetic oligonucleotide
tgaatacaacacac

SEQ ID NO: 593 - DNA, 14 bp, Artificial sequence
  Synthetic oligonucleotide
atgaatacaacaca

SEQ ID NO: 594 - DNA, 14 bp, Artificial sequence
  Synthetic oligonucleotide
cctaataaaatata

SEQ ID NO: 595 - DNA, 14 bp, Artificial sequence
  Synthetic oligonucleotide
tcctaataaaatat

SEQ ID NO: 596 - DNA, 14 bp, Artificial sequence
  Synthetic oligonucleotide
ctcctaataaaata

SEQ ID NO: 597 - DNA, 14 bp, Artificial sequence
  Synthetic oligonucleotide
actcctaataaaat

SEQ ID NO: 598 - DNA, 14 bp, Artificial sequence
  Synthetic oligonucleotide
tactcctaataaaa

SEQ ID NO: 599 - DNA, 14 bp, Artificial sequence
  Synthetic oligonucleotide
ctactcctaataaa

SEQ ID NO: 600 - DNA, 14 bp, Artificial sequence
  Synthetic oligonucleotide
actactcctaataa

SEQ ID NO: 601 - DNA, 14 bp, Artificial sequence
  Synthetic oligonucleotide
aactactcctaata

SEQ ID NO: 602 - DNA, 14 bp, Artificial sequence
  Synthetic oligonucleotide
taactactcctaat

SEQ ID NO: 603 - DNA, 14 bp, Artificial sequence
  Synthetic oligonucleotide
ataactactcctaa

SEQ ID NO: 604 - DNA, 14 bp, Artificial sequence
  Synthetic oligonucleotide
tataactactccta

SEQ ID NO: 605 - DNA, 14 bp, Artificial sequence
  Synthetic oligonucleotide
atataactactcct

SEQ ID NO: 606 - DNA, 14 bp, Artificial sequence
  Synthetic oligonucleotide
aatataactactcc

SEQ ID NO: 607 - DNA, 14 bp, Artificial sequence
  Synthetic oligonucleotide
aaatataactactc

SEQ ID NO: 608 - DNA, 14 bp, Artificial sequence
  Synthetic oligonucleotide
aaaatataactact

SEQ ID NO: 609 - DNA, 14 bp, Artificial sequence
  Synthetic oligonucleotide
aaaaatataactac

SEQ ID NO: 610 - DNA, 14 bp, Artificial sequence
  Synthetic oligonucleotide
taaaaatataacta

SEQ ID NO: 611 - DNA, 14 bp, Artificial sequence
  Synthetic oligonucleotide
gtaaaaatataact

SEQ ID NO: 612 - DNA, 14 bp, Artificial sequence
  Synthetic oligonucleotide
agtaaaaatataac

SEQ ID NO: 613 - DNA, 14 bp, Artificial sequence
  Synthetic oligonucleotide
actgatacccacaa

SEQ ID NO: 614 - DNA, 14 bp, Artificial sequence
  Synthetic oligonucleotide
aactgatacccaca

SEQ ID NO: 615 - DNA, 14 bp, Artificial sequence
  Synthetic oligonucleotide
caactgatacccac

SEQ ID NO: 616 - DNA, 14 bp, Artificial sequence
  Synthetic oligonucleotide
tcaactgataccca

SEQ ID NO: 617 - DNA, 14 bp, Artificial sequence
  Synthetic oligonucleotide
atcactaaaaaact

SEQ ID NO: 618 - DNA, 14 bp, Artificial sequence
  Synthetic oligonucleotide
tatcactaaaaaac

SEQ ID NO: 619 - DNA, 14 bp, Artificial sequence
  Synthetic oligonucleotide
atatcactaaaaaa

SEQ ID NO: 620 - DNA, 14 bp, Artificial sequence
  Synthetic oligonucleotide
tatatcactaaaaa

SEQ ID NO: 621 - DNA, 14 bp, Artificial sequence
  Synthetic oligonucleotide
ttatatcactaaaa

SEQ ID NO: 622 - DNA, 14 bp, Artificial sequence
  Synthetic oligonucleotide
tttatatcactaaa

SEQ ID NO: 623 - DNA, 14 bp, Artificial sequence
  Synthetic oligonucleotide
gtttatatcactaa

SEQ ID NO: 624 - DNA, 14 bp, Artificial sequence
  Synthetic oligonucleotide
aaacttttaattaa

SEQ ID NO: 625 - DNA, 14 bp, Artificial sequence
  Synthetic oligonucleotide
caaacttttaatta

SEQ ID NO: 626 - DNA, 14 bp, Artificial sequence
  Synthetic oligonucleotide
tcaaacttttaatt

SEQ ID NO: 627 - DNA, 14 bp, Artificial sequence
  Synthetic oligonucleotide
ttcaaacttttaat

SEQ ID NO: 628 - DNA, 14 bp, Artificial sequence
  Synthetic oligonucleotide
cttcaaacttttaa

SEQ ID NO: 629 - DNA, 14 bp, Artificial sequence
  Synthetic oligonucleotide
acttcaaactttta

SEQ ID NO: 630 - DNA, 14 bp, Artificial sequence
  Synthetic oligonucleotide
cacttcaaactttt

SEQ ID NO: 631 - DNA, 14 bp, Artificial sequence
  Synthetic oligonucleotide
ccacttcaaacttt

SEQ ID NO: 632 - DNA, 14 bp, Artificial sequence
  Synthetic oligonucleotide
cccacttcaaactt

SEQ ID NO: 633 - DNA, 14 bp, Artificial sequence
  Synthetic oligonucleotide
acccacttcaaact

SEQ ID NO: 634 - DNA, 14 bp, Artificial sequence
  Synthetic oligonucleotide
aacccacttcaaac

SEQ ID NO: 635 - DNA, 14 bp, Artificial sequence
  Synthetic oligonucleotide
aaacccacttcaaa

SEQ ID NO: 636 - DNA, 14 bp, Artificial sequence
  Synthetic oligonucleotide
aaaacccacttcaa

SEQ ID NO: 637 - DNA, 14 bp, Artificial sequence
  Synthetic oligonucleotide
aaaaacccacttca

SEQ ID NO: 638 - DNA, 14 bp, Artificial sequence
  Synthetic oligonucleotide
aaaaaacccacttc

SEQ ID NO: 639 - DNA, 14 bp, Artificial sequence
  Synthetic oligonucleotide
caaaaaacccactt

SEQ ID NO: 640 - DNA, 14 bp, Artificial sequence
  Synthetic oligonucleotide
acaaaaaacccact

SEQ ID NO: 641 - DNA, 14 bp, Artificial sequence
  Synthetic oligonucleotide
aacaaaaaacccac

SEQ ID NO: 642 - DNA, 14 bp, Artificial sequence
  Synthetic oligonucleotide
aaacaaaaaaccca

SEQ ID NO: 643 - DNA, 14 bp, Artificial sequence
  Synthetic oligonucleotide
aaaacaaaaaaccc

SEQ ID NO: 644 - DNA, 14 bp, Artificial sequence
  Synthetic oligonucleotide
atcttcccattaat

SEQ ID NO: 645 - DNA, 14 bp, Artificial sequence
  Synthetic oligonucleotide
aatcttcccattaa

SEQ ID NO: 646 - DNA, 14 bp, Artificial sequence
  Synthetic oligonucleotide
taatcttcccatta

SEQ ID NO: 647 - DNA, 14 bp, Artificial sequence
  Synthetic oligonucleotide
ataatcttcccatt

SEQ ID NO: 648 - DNA, 14 bp, Artificial sequence
  Synthetic oligonucleotide
aataatcttcccat

SEQ ID NO: 649 - DNA, 14 bp, Artificial sequence
  Synthetic oligonucleotide
aaataatcttccca

SEQ ID NO: 650 - DNA, 14 bp, Artificial sequence
  Synthetic oligonucleotide
aaaataatcttccc

SEQ ID NO: 651 - DNA, 14 bp, Artificial sequence
  Synthetic oligonucleotide
tattaatcaaaaat

SEQ ID NO: 652 - DNA, 14 bp, Artificial sequence
  Synthetic oligonucleotide
ctattaatcaaaaa

SEQ ID NO: 653 - DNA, 14 bp, Artificial sequence
  Synthetic oligonucleotide
tctattaatcaaaa

SEQ ID NO: 654 - DNA, 14 bp, Artificial sequence
  Synthetic oligonucleotide
ctctattaatcaaa

SEQ ID NO: 655 - DNA, 14 bp, Artificial sequence
  Synthetic oligonucleotide
actctattaatcaa

SEQ ID NO: 656 - DNA, 14 bp, Artificial sequence
  Synthetic oligonucleotide
gactctattaatca

SEQ ID NO: 657 - DNA, 14 bp, Artificial sequence
  Synthetic oligonucleotide
tattctactcttct

SEQ ID NO: 658 - DNA, 14 bp, Artificial sequence
  Synthetic oligonucleotide
atattctactcttc

SEQ ID NO: 659 - DNA, 14 bp, Artificial sequence
  Synthetic oligonucleotide
aatattctactctt

SEQ ID NO: 660 - DNA, 14 bp, Artificial sequence
  Synthetic oligonucleotide
gaatattctactct

SEQ ID NO: 661 - DNA, 14 bp, Artificial sequence
  Synthetic oligonucleotide
agaatattctactc

SEQ ID NO: 662 - DNA, 14 bp, Artificial sequence
  Synthetic oligonucleotide
atttaccaattcaa

SEQ ID NO: 663 - DNA, 14 bp, Artificial sequence
  Synthetic oligonucleotide
tatttaccaattca

SEQ ID NO: 664 - DNA, 14 bp, Artificial sequence
  Synthetic oligonucleotide
gtatttaccaattc

SEQ ID NO: 665 - DNA, 14 bp, Artificial sequence
  Synthetic oligonucleotide
tgtatttaccaatt

SEQ ID NO: 666 - DNA, 14 bp, Artificial sequence
  Synthetic oligonucleotide
ctgtatttaccaat

SEQ ID NO: 667 - DNA, 14 bp, Artificial sequence
  Synthetic oligonucleotide
actgtatttaccaa

SEQ ID NO: 668 - DNA, 14 bp, Artificial sequence
  Synthetic oligonucleotide
ttataccatcaaat

SEQ ID NO: 669 - DNA, 14 bp, Artificial sequence
  Synthetic oligonucleotide
attataccatcaaa

SEQ ID NO: 670 - DNA, 14 bp, Artificial sequence
  Synthetic oligonucleotide
cattataccatcaa

SEQ ID NO: 671 - DNA, 14 bp, Artificial sequence
  Synthetic oligonucleotide
tcattataccatca

SEQ ID NO: 672 - DNA, 14 bp, Artificial sequence
  Synthetic oligonucleotide
ttcattataccatc

SEQ ID NO: 673 - DNA, 14 bp, Artificial sequence
  Synthetic oligonucleotide
cttcattataccat

SEQ ID NO: 674 - DNA, 14 bp, Artificial sequence
  Synthetic oligonucleotide
tcttcattatacca

SEQ ID NO: 675 - DNA, 14 bp, Artificial sequence
  Synthetic oligonucleotide
ttcttcattatacc

SEQ ID NO: 676 - DNA, 14 bp, Artificial sequence
  Synthetic oligonucleotide
tttcttcattatac

SEQ ID NO: 677 - DNA, 14 bp, Artificial sequence
  Synthetic oligonucleotide
ttttcttcattata

SEQ ID NO: 678 - DNA, 14 bp, Artificial sequence
  Synthetic oligonucleotide
attttcttcattat

SEQ ID NO: 679 - DNA, 14 bp, Artificial sequence
  Synthetic oligonucleotide
tattttcttcatta

SEQ ID NO: 680 - DNA, 14 bp, Artificial sequence
  Synthetic oligonucleotide
atattttcttcatt

SEQ ID NO: 681 - DNA, 14 bp, Artificial sequence
  Synthetic oligonucleotide
aatattttcttcat

SEQ ID NO: 682 - DNA, 14 bp, Artificial sequence
  Synthetic oligonucleotide
aaatattttcttca

SEQ ID NO: 683 - DNA, 14 bp, Artificial sequence
  Synthetic oligonucleotide
taaatattttcttc

SEQ ID NO: 684 - DNA, 14 bp, Artificial sequence
  Synthetic oligonucleotide
aataatccaaactt

SEQ ID NO: 685 - DNA, 14 bp, Artificial sequence
  Synthetic oligonucleotide
aaataatccaaact

SEQ ID NO: 686 - DNA, 14 bp, Artificial sequence
  Synthetic oligonucleotide
aaaataatccaaac

SEQ ID NO: 687 - DNA, 14 bp, Artificial sequence
  Synthetic oligonucleotide
caaaataatccaaa

SEQ ID NO: 688 - DNA, 14 bp, Artificial sequence
  Synthetic oligonucleotide
acaaaataatccaa

SEQ ID NO: 689 - DNA, 14 bp, Artificial sequence
  Synthetic oligonucleotide
tacaaaataatcca

SEQ ID NO: 690 - DNA, 14 bp, Artificial sequence
  Synthetic oligonucleotide
ttacaaaataatcc

SEQ ID NO: 691 - DNA, 14 bp, Artificial sequence
  Synthetic oligonucleotide
gttacaaaataatc

SEQ ID NO: 692 - DNA, 14 bp, Artificial sequence
  Synthetic oligonucleotide
tgttacaaaataat

SEQ ID NO: 693 - DNA, 14 bp, Artificial sequence
  Synthetic oligonucleotide
ttttacattaacta

SEQ ID NO: 694 - DNA, 14 bp, Artificial sequence
  Synthetic oligonucleotide
tttttacattaact

SEQ ID NO: 695 - DNA, 14 bp, Artificial sequence
  Synthetic oligonucleotide
ttttttacattaac

SEQ ID NO: 696 - DNA, 14 bp, Artificial sequence
  Synthetic oligonucleotide
attttttacattaa

SEQ ID NO: 697 - DNA, 14 bp, Artificial sequence
  Synthetic oligonucleotide
tattttttacatta

SEQ ID NO: 698 - DNA, 14 bp, Artificial sequence
  Synthetic oligonucleotide
ttattttttacatt

SEQ ID NO: 699 - DNA, 14 bp, Artificial sequence
  Synthetic oligonucleotide
aaatactaacatca

SEQ ID NO: 700 - DNA, 14 bp, Artificial sequence
  Synthetic oligonucleotide
aaaatactaacatc

SEQ ID NO: 701 - DNA, 14 bp, Artificial sequence
  Synthetic oligonucleotide
caaaatactaacat

SEQ ID NO: 702 - DNA, 14 bp, Artificial sequence
  Synthetic oligonucleotide
ccaaaatactaaca

SEQ ID NO: 703 - DNA, 14 bp, Artificial sequence
  Synthetic oligonucleotide
gccaaaatactaac

SEQ ID NO: 704 - DNA, 14 bp, Artificial sequence
  Synthetic oligonucleotide
tgccaaaatactaa

SEQ ID NO: 705 - DNA, 14 bp, Artificial sequence
  Synthetic oligonucleotide
tccattcattttat

SEQ ID NO: 706 - DNA, 14 bp, Artificial sequence
  Synthetic oligonucleotide
atccattcatttta

SEQ ID NO: 707 - DNA, 14 bp, Artificial sequence
  Synthetic oligonucleotide
catccattcatttt

SEQ ID NO: 708 - DNA, 14 bp, Artificial sequence
  Synthetic oligonucleotide
acatccattcattt

SEQ ID NO: 709 - DNA, 14 bp, Artificial sequence
  Synthetic oligonucleotide
cacatccattcatt

SEQ ID NO: 710 - DNA, 14 bp, Artificial sequence
  Synthetic oligonucleotide
ccacatccattcat

SEQ ID NO: 711 - DNA, 14 bp, Artificial sequence
  Synthetic oligonucleotide
gccacatccattca

SEQ ID NO: 712 - DNA, 14 bp, Artificial sequence
  Synthetic oligonucleotide
tgccacatccattc

SEQ ID NO: 713 - DNA, 14 bp, Artificial sequence
  Synthetic oligonucleotide
atgccacatccatt

SEQ ID NO: 714 - DNA, 14 bp, Artificial sequence
  Synthetic oligonucleotide
tatgccacatccat

SEQ ID NO: 715 - DNA, 14 bp, Artificial sequence
  Synthetic oligonucleotide
ttatgccacatcca

SEQ ID NO: 716 - DNA, 14 bp, Artificial sequence
  Synthetic oligonucleotide
attatgccacatcc

SEQ ID NO: 717 - DNA, 14 bp, Artificial sequence
  Synthetic oligonucleotide
tcttaactcttctc

SEQ ID NO: 718 - DNA, 14 bp, Artificial sequence
  Synthetic oligonucleotide
ttcttaactcttct

SEQ ID NO: 719 - DNA, 14 bp, Artificial sequence
  Synthetic oligonucleotide
gttcttaactcttc

SEQ ID NO: 720 - DNA, 14 bp, Artificial sequence
  Synthetic oligonucleotide
agttcttaactctt

SEQ ID NO: 721 - DNA, 14 bp, Artificial sequence
  Synthetic oligonucleotide
tagttcttaactct

SEQ ID NO: 722 - DNA, 14 bp, Artificial sequence
  Synthetic oligonucleotide
caaatactcaaaaa

SEQ ID NO: 723 - DNA, 14 bp, Artificial sequence
  Synthetic oligonucleotide
tcaaatactcaaaa

SEQ ID NO: 724 - DNA, 14 bp, Artificial sequence
  Synthetic oligonucleotide
ttcaaatactcaaa

SEQ ID NO: 725 - DNA, 14 bp, Artificial sequence
  Synthetic oligonucleotide
cttcaaatactcaa

SEQ ID NO: 726 - DNA, 14 bp, Artificial sequence
  Synthetic oligonucleotide
gcttcaaatactca

SEQ ID NO: 727 - DNA, 14 bp, Artificial sequence
  Synthetic oligonucleotide
agcttcaaatactc

SEQ ID NO: 728 - DNA, 14 bp, Artificial sequence
  Synthetic oligonucleotide
aagcttcaaatact

SEQ ID NO: 729 - DNA, 14 bp, Artificial sequence
  Synthetic oligonucleotide
cctcattacccatt

SEQ ID NO: 730 - DNA, 14 bp, Artificial sequence
  Synthetic oligonucleotide
tcctcattacccat

SEQ ID NO: 731 - DNA, 14 bp, Artificial sequence
  Synthetic oligonucleotide
atcctcattaccca

SEQ ID NO: 732 - DNA, 14 bp, Artificial sequence
  Synthetic oligonucleotide
tatcctcattaccc

SEQ ID NO: 733 - DNA, 14 bp, Artificial sequence
  Synthetic oligonucleotide
atatcctcattacc

SEQ ID NO: 734 - DNA, 14 bp, Artificial sequence
  Synthetic oligonucleotide
aatatcctcattac

SEQ ID NO: 735 - DNA, 14 bp, Artificial sequence
  Synthetic oligonucleotide
taatatcctcatta

SEQ ID NO: 736 - DNA, 14 bp, Artificial sequence
  Synthetic oligonucleotide
ttaatatcctcatt

SEQ ID NO: 737 - DNA, 14 bp, Artificial sequence
  Synthetic oligonucleotide
tttaatatcctcat

SEQ ID NO: 738 - DNA, 14 bp, Artificial sequence
  Synthetic oligonucleotide
atttaatatcctca

SEQ ID NO: 739 - DNA, 14 bp, Artificial sequence
  Synthetic oligonucleotide
aatttaatatcctc

SEQ ID NO: 740 - DNA, 14 bp, Artificial sequence
  Synthetic oligonucleotide
aaatttaatatcct

SEQ ID NO: 741 - DNA, 14 bp, Artificial sequence
  Synthetic oligonucleotide
taaatttaatatcc

SEQ ID NO: 742 - DNA, 14 bp, Artificial sequence
  Synthetic oligonucleotide
ttaaatttaatatc

SEQ ID NO: 743 - DNA, 14 bp, Artificial sequence
  Synthetic oligonucleotide
cttaaatttaatat

SEQ ID NO: 744 - DNA, 14 bp, Artificial sequence
  Synthetic oligonucleotide
tcttaaatttaata

SEQ ID NO: 745 - DNA, 14 bp, Artificial sequence
  Synthetic oligonucleotide
ttcttaaatttaat

SEQ ID NO: 746 - DNA, 14 bp, Artificial sequence
  Synthetic oligonucleotide
gttcttaaatttaa

SEQ ID NO: 747 - DNA, 14 bp, Artificial sequence
  Synthetic oligonucleotide
ttattctactttta

SEQ ID NO: 748 - DNA, 14 bp, Artificial sequence
  Synthetic oligonucleotide
tttattctactttt

SEQ ID NO: 749 - DNA, 14 bp, Artificial sequence
  Synthetic oligonucleotide
ctttattctacttt

SEQ ID NO: 750 - DNA, 14 bp, Artificial sequence
  Synthetic oligonucleotide
cctttattctactt

SEQ ID NO: 751 - DNA, 14 bp, Artificial sequence
  Synthetic oligonucleotide
gcctttattctact

SEQ ID NO: 752 - DNA, 14 bp, Artificial sequence
  Synthetic oligonucleotide
aacaattattaata

SEQ ID NO: 753 - DNA, 14 bp, Artificial sequence
  Synthetic oligonucleotide
caacaattattaat

SEQ ID NO: 754 - DNA, 14 bp, Artificial sequence
  Synthetic oligonucleotide
gcaacaattattaa

SEQ ID NO: 755 - DNA, 14 bp, Artificial sequence
  Synthetic oligonucleotide
agcaacaattatta

SEQ ID NO: 756 - DNA, 14 bp, Artificial sequence
  Synthetic oligonucleotide
cagcaacaattatt

SEQ ID NO: 757 - DNA, 14 bp, Artificial sequence
  Synthetic oligonucleotide
ccagcaacaattat

SEQ ID NO: 758 - DNA, 14 bp, Artificial sequence
  Synthetic oligonucleotide
accagcaacaatta

SEQ ID NO: 759 - DNA, 14 bp, Artificial sequence
  Synthetic oligonucleotide
aaaccaaaacttac

SEQ ID NO: 760 - DNA, 14 bp, Artificial sequence
  Synthetic oligonucleotide
aaaaccaaaactta

SEQ ID NO: 761 - DNA, 14 bp, Artificial sequence
  Synthetic oligonucleotide
aaaaaccaaaactt

SEQ ID NO: 762 - DNA, 14 bp, Artificial sequence
  Synthetic oligonucleotide
caaaaaccaaaact

SEQ ID NO: 763 - DNA, 14 bp, Artificial sequence
  Synthetic oligonucleotide
ccaaaaaccaaaac

SEQ ID NO: 764 - DNA, 14 bp, Artificial sequence
  Synthetic oligonucleotide
accaaaaaccaaaa

SEQ ID NO: 765 - DNA, 14 bp, Artificial sequence
  Synthetic oligonucleotide
aaccaaaaaccaaa

SEQ ID NO: 766 - DNA, 14 bp, Artificial sequence
  Synthetic oligonucleotide
aaaccaaaaaccaa

SEQ ID NO: 767 - DNA, 14 bp, Artificial sequence
  Synthetic oligonucleotide
atctaaaacacttc

SEQ ID NO: 768 - DNA, 14 bp, Artificial sequence
  Synthetic oligonucleotide
aatctaaaacactt

SEQ ID NO: 769 - DNA, 14 bp, Artificial sequence
  Synthetic oligonucleotide
aaatctaaaacact

SEQ ID NO: 770 - DNA, 14 bp, Artificial sequence
  Synthetic oligonucleotide
caaatctaaaacac

SEQ ID NO: 771 - DNA, 14 bp, Artificial sequence
  Synthetic oligonucleotide
ccaaatctaaaaca

SEQ ID NO: 772 - DNA, 14 bp, Artificial sequence
  Synthetic oligonucleotide
cccaaatctaaaac

SEQ ID NO: 773 - DNA, 14 bp, Artificial sequence
  Synthetic oligonucleotide
ccccaaatctaaaa

SEQ ID NO: 774 - DNA, 14 bp, Artificial sequence
  Synthetic oligonucleotide
accccaaatctaaa

SEQ ID NO: 775 - DNA, 14 bp, Artificial sequence
  Synthetic oligonucleotide
aaccccaaatctaa

SEQ ID NO: 776 - DNA, 14 bp, Artificial sequence
  Synthetic oligonucleotide
aaaccccaaatcta

SEQ ID NO: 777 - DNA, 14 bp, Artificial sequence
  Synthetic oligonucleotide
attcacaaatccta

SEQ ID NO: 778 - DNA, 14 bp, Artificial sequence
  Synthetic oligonucleotide
tattcacaaatcct

SEQ ID NO: 779 - DNA, 14 bp, Artificial sequence
  Synthetic oligonucleotide
atattcacaaatcc

SEQ ID NO: 780 - DNA, 14 bp, Artificial sequence
  Synthetic oligonucleotide
aatattcacaaatc

SEQ ID NO: 781 - DNA, 14 bp, Artificial sequence
  Synthetic oligonucleotide
aaatattcacaaat

SEQ ID NO: 782 - DNA, 14 bp, Artificial sequence
  Synthetic oligonucleotide
caaatattcacaaa

SEQ ID NO: 783 - DNA, 14 bp, Artificial sequence
  Synthetic oligonucleotide
gcaaatattcacaa

SEQ ID NO: 784 - DNA, 14 bp, Artificial sequence
  Synthetic oligonucleotide
aacacacattatca

SEQ ID NO: 785 - DNA, 14 bp, Artificial sequence
  Synthetic oligonucleotide
taacacacattatc

SEQ ID NO: 786 - DNA, 14 bp, Artificial sequence
  Synthetic oligonucleotide
ttaacacacattat

SEQ ID NO: 787 - DNA, 14 bp, Artificial sequence
  Synthetic oligonucleotide
tttaacacacatta

SEQ ID NO: 788 - DNA, 14 bp, Artificial sequence
  Synthetic oligonucleotide
atttaacacacatt

SEQ ID NO: 789 - DNA, 14 bp, Artificial sequence
  Synthetic oligonucleotide
tatttaacacacat

SEQ ID NO: 790 - DNA, 14 bp, Artificial sequence
  Synthetic oligonucleotide
ctatttaacacaca

SEQ ID NO: 791 - DNA, 14 bp, Artificial sequence
  Synthetic oligonucleotide
actatttaacacac

SEQ ID NO: 792 - DNA, 14 bp, Artificial sequence
  Synthetic oligonucleotide
tactatttaacaca

SEQ ID NO: 793 - DNA, 14 bp, Artificial sequence
  Synthetic oligonucleotide
ctactatttaacac

SEQ ID NO: 794 - DNA, 14 bp, Artificial sequence
  Synthetic oligonucleotide
actactatttaaca

SEQ ID NO: 795 - DNA, 14 bp, Artificial sequence
  Synthetic oligonucleotide
aactactatttaac

SEQ ID NO: 796 - DNA, 14 bp, Artificial sequence
  Synthetic oligonucleotide
aaactactatttaa

SEQ ID NO: 797 - DNA, 14 bp, Artificial sequence
  Synthetic oligonucleotide
aaaactactattta

SEQ ID NO: 798 - DNA, 14 bp, Artificial sequence
  Synthetic oligonucleotide
gaaaactactattt

SEQ ID NO: 799 - DNA, 14 bp, Artificial sequence
  Synthetic oligonucleotide
tgaaaactactatt

SEQ ID NO: 800 - DNA, 14 bp, Artificial sequence
  Synthetic oligonucleotide
aaataacctatcat

SEQ ID NO: 801 - DNA, 14 bp, Artificial sequence
  Synthetic oligonucleotide
aaaataacctatca

SEQ ID NO: 802 - DNA, 14 bp, Artificial sequence
  Synthetic oligonucleotide
caaaataacctatc

SEQ ID NO: 803 - DNA, 14 bp, Artificial sequence
  Synthetic oligonucleotide
acaaaataacctat

SEQ ID NO: 804 - DNA, 14 bp, Artificial sequence
  Synthetic oligonucleotide
cacaaaataaccta

SEQ ID NO: 805 - DNA, 14 bp, Artificial sequence
  Synthetic oligonucleotide
tcacaaaataacct

SEQ ID NO: 806 - DNA, 14 bp, Artificial sequence
  Synthetic oligonucleotide
atcacaaaataacc

SEQ ID NO: 807 - DNA, 14 bp, Artificial sequence
  Synthetic oligonucleotide
catcacaaaataac

SEQ ID NO: 808 - DNA, 14 bp, Artificial sequence
  Synthetic oligonucleotide
tcatcacaaaataa

SEQ ID NO: 809 - DNA, 14 bp, Artificial sequence
  Synthetic oligonucleotide
ttcatcacaaaata

SEQ ID NO: 810 - DNA, 14 bp, Artificial sequence
  Synthetic oligonucleotide
tttcatcacaaaat

SEQ ID NO: 811 - DNA, 14 bp, Artificial sequence
  Synthetic oligonucleotide
ttttcatcacaaaa

SEQ ID NO: 812 - DNA, 14 bp, Artificial sequence
  Synthetic oligonucleotide
attttcatcacaaa

SEQ ID NO: 813 - DNA, 14 bp, Artificial sequence
  Synthetic oligonucleotide
tattttcatcacaa

SEQ ID NO: 814 - DNA, 14 bp, Artificial sequence
  Synthetic oligonucleotide
gtattttcatcaca

SEQ ID NO: 815 - DNA, 14 bp, Artificial sequence
  Synthetic oligonucleotide
atttaaatttatca

SEQ ID NO: 816 - DNA, 14 bp, Artificial sequence
  Synthetic oligonucleotide
aatttaaatttatc

SEQ ID NO: 817 - DNA, 14 bp, Artificial sequence
  Synthetic oligonucleotide
aaatttaaatttat

SEQ ID NO: 818 - DNA, 14 bp, Artificial sequence
  Synthetic oligonucleotide
aaaatttaaattta

SEQ ID NO: 819 - DNA, 14 bp, Artificial sequence
  Synthetic oligonucleotide
taaaatttaaattt

SEQ ID NO: 820 - DNA, 14 bp, Artificial sequence
  Synthetic oligonucleotide
ataaaatttaaatt

SEQ ID NO: 821 - DNA, 14 bp, Artificial sequence
  Synthetic oligonucleotide
cataaaatttaaat

SEQ ID NO: 822 - DNA, 14 bp, Artificial sequence
  Synthetic oligonucleotide
acataaaatttaaa

SEQ ID NO: 823 - DNA, 14 bp, Artificial sequence
  Synthetic oligonucleotide
ctactaatattcat

SEQ ID NO: 824 - DNA, 14 bp, Artificial sequence
  Synthetic oligonucleotide
cctactaatattca

SEQ ID NO: 825 - DNA, 14 bp, Artificial sequence
  Synthetic oligonucleotide
acctactaatattc

SEQ ID NO: 826 - DNA, 14 bp, Artificial sequence
  Synthetic oligonucleotide
cacctactaatatt

SEQ ID NO: 827 - DNA, 14 bp, Artificial sequence
  Synthetic oligonucleotide
tcacctactaatat

SEQ ID NO: 828 - DNA, 14 bp, Artificial sequence
  Synthetic oligonucleotide
ttcacctactaata

SEQ ID NO: 829 - DNA, 14 bp, Artificial sequence
  Synthetic oligonucleotide
tttcacctactaat

SEQ ID NO: 830 - DNA, 14 bp, Artificial sequence
  Synthetic oligonucleotide
ttttcacctactaa

SEQ ID NO: 831 - DNA, 14 bp, Artificial sequence
  Synthetic oligonucleotide
tttttcacctacta

SEQ ID NO: 832 - DNA, 14 bp, Artificial sequence
  Synthetic oligonucleotide
atttttcacctact

SEQ ID NO: 833 - DNA, 14 bp, Artificial sequence
  Synthetic oligonucleotide
tatttttcacctac

SEQ ID NO: 834 - DNA, 14 bp, Artificial sequence
  Synthetic oligonucleotide
ttatttttcaccta

SEQ ID NO: 835 - DNA, 14 bp, Artificial sequence
  Synthetic oligonucleotide
tttatttttcacct

SEQ ID NO: 836 - DNA, 14 bp, Artificial sequence
  Synthetic oligonucleotide
ttctactactaatt

SEQ ID NO: 837 - DNA, 14 bp, Artificial sequence
  Synthetic oligonucleotide
cttctactactaat

SEQ ID NO: 838 - DNA, 14 bp, Artificial sequence
  Synthetic oligonucleotide
acttctactactaa

SEQ ID NO: 839 - DNA, 14 bp, Artificial sequence
  Synthetic oligonucleotide
aacttctactacta

SEQ ID NO: 840 - DNA, 14 bp, Artificial sequence
  Synthetic oligonucleotide
caacttctactact

SEQ ID NO: 841 - DNA, 14 bp, Artificial sequence
  Synthetic oligonucleotide
tcaacttctactac

SEQ ID NO: 842 - DNA, 14 bp, Artificial sequence
  Synthetic oligonucleotide
ctcaacttctacta

SEQ ID NO: 843 - DNA, 14 bp, Artificial sequence
  Synthetic oligonucleotide
tctcaacttctact

SEQ ID NO: 844 - DNA, 14 bp, Artificial sequence
  Synthetic oligonucleotide
ctctcaacttctac

SEQ ID NO: 845 - DNA, 14 bp, Artificial sequence
  Synthetic oligonucleotide
tctctcaacttcta

SEQ ID NO: 846 - DNA, 14 bp, Artificial sequence
  Synthetic oligonucleotide
ttctctcaacttct

SEQ ID NO: 847 - DNA, 14 bp, Artificial sequence
  Synthetic oligonucleotide
tttctctcaacttc

SEQ ID NO: 848 - DNA, 14 bp, Artificial sequence
  Synthetic oligonucleotide
ttttctctcaactt

SEQ ID NO: 849 - DNA, 14 bp, Artificial sequence
  Synthetic oligonucleotide
tttttctctcaact

SEQ ID NO: 850 - DNA, 14 bp, Artificial sequence
  Synthetic oligonucleotide
ctttttctctcaac

SEQ ID NO: 851 - DNA, 14 bp, Artificial sequence
  Synthetic oligonucleotide
actttttctctcaa

SEQ ID NO: 852 - DNA, 14 bp, Artificial sequence
  Synthetic oligonucleotide
tactttttctctca

SEQ ID NO: 853 - DNA, 14 bp, Artificial sequence
  Synthetic oligonucleotide
ttactttttctctc

SEQ ID NO: 854 - DNA, 14 bp, Artificial sequence
  Synthetic oligonucleotide
gttactttttctct

SEQ ID NO: 855 - DNA, 14 bp, Artificial sequence
  Synthetic oligonucleotide
agttactttttctc

SEQ ID NO: 856 - DNA, 14 bp, Artificial sequence
  Synthetic oligonucleotide
cattcccattaaca

SEQ ID NO: 857 - DNA, 14 bp, Artificial sequence
  Synthetic oligonucleotide
acattcccattaac

SEQ ID NO: 858 - DNA, 14 bp, Artificial sequence
  Synthetic oligonucleotide
tacattcccattaa

SEQ ID NO: 859 - DNA, 14 bp, Artificial sequence
  Synthetic oligonucleotide
ttacattcccatta

SEQ ID NO: 860 - DNA, 14 bp, Artificial sequence
  Synthetic oligonucleotide
tttacattcccatt

SEQ ID NO: 861 - DNA, 14 bp, Artificial sequence
  Synthetic oligonucleotide
ttttacattcccat

SEQ ID NO: 862 - DNA, 14 bp, Artificial sequence
  Synthetic oligonucleotide
cttttacattccca

SEQ ID NO: 863 - DNA, 14 bp, Artificial sequence
  Synthetic oligonucleotide
acttttacattccc

SEQ ID NO: 864 - DNA, 14 bp, Artificial sequence
  Synthetic oligonucleotide
cacttttacattcc

SEQ ID NO: 865 - DNA, 14 bp, Artificial sequence
  Synthetic oligonucleotide
acacttttacattc

SEQ ID NO: 866 - DNA, 14 bp, Artificial sequence
  Synthetic oligonucleotide
tacacttttacatt

SEQ ID NO: 867 - DNA, 14 bp, Artificial sequence
  Synthetic oligonucleotide
gtacacttttacat

SEQ ID NO: 868 - DNA, 14 bp, Artificial sequence
  Synthetic oligonucleotide
tgtacacttttaca

SEQ ID NO: 869 - DNA, 14 bp, Artificial sequence
  Synthetic oligonucleotide
tttatcaaaaaaat

SEQ ID NO: 870 - DNA, 14 bp, Artificial sequence
  Synthetic oligonucleotide
atttatcaaaaaaa

SEQ ID NO: 871 - DNA, 14 bp, Artificial sequence
  Synthetic oligonucleotide
catttatcaaaaaa

SEQ ID NO: 872 - DNA, 14 bp, Artificial sequence
  Synthetic oligonucleotide
acatttatcaaaaa

SEQ ID NO: 873 - DNA, 14 bp, Artificial sequence
  Synthetic oligonucleotide
tacatttatcaaaa

SEQ ID NO: 874 - DNA, 14 bp, Artificial sequence
  Synthetic oligonucleotide
atacatttatcaaa

SEQ ID NO: 875 - DNA, 14 bp, Artificial sequence
  Synthetic oligonucleotide
tatacatttatcaa

SEQ ID NO: 876 - DNA, 14 bp, Artificial sequence
  Synthetic oligonucleotide
acatcttccaattt

SEQ ID NO: 877 - DNA, 14 bp, Artificial sequence
  Synthetic oligonucleotide
tacatcttccaatt

SEQ ID NO: 878 - DNA, 14 bp, Artificial sequence
  Synthetic oligonucleotide
ttacatcttccaat

SEQ ID NO: 879 - DNA, 14 bp, Artificial sequence
  Synthetic oligonucleotide
tttacatcttccaa

SEQ ID NO: 880 - DNA, 14 bp, Artificial sequence
  Synthetic oligonucleotide
atttacatcttcca

SEQ ID NO: 881 - DNA, 14 bp, Artificial sequence
  Synthetic oligonucleotide
tatttacatcttcc

SEQ ID NO: 882 - DNA, 14 bp, Artificial sequence
  Synthetic oligonucleotide
ttatttacatcttc

SEQ ID NO: 883 - DNA, 14 bp, Artificial sequence
  Synthetic oligonucleotide
cttatttacatctt

SEQ ID NO: 884 - DNA, 14 bp, Artificial sequence
  Synthetic oligonucleotide
tcttatttacatct

SEQ ID NO: 885 - DNA, 14 bp, Artificial sequence
  Synthetic oligonucleotide
atcttatttacatc

SEQ ID NO: 886 - DNA, 14 bp, Artificial sequence
  Synthetic oligonucleotide
aatcttatttacat

SEQ ID NO: 887 - DNA, 14 bp, Artificial sequence
  Synthetic oligonucleotide
gaatcttatttaca

SEQ ID NO: 888 - DNA, 14 bp, Artificial sequence
  Synthetic oligonucleotide
tgaatcttatttac

SEQ ID NO: 889 - DNA, 14 bp, Artificial sequence
  Synthetic oligonucleotide
ttcccttcactcct

SEQ ID NO: 890 - DNA, 14 bp, Artificial sequence
  Synthetic oligonucleotide
tttcccttcactcc

SEQ ID NO: 891 - DNA, 14 bp, Artificial sequence
  Synthetic oligonucleotide
ttttcccttcactc

SEQ ID NO: 892 - DNA, 14 bp, Artificial sequence
  Synthetic oligonucleotide
attttcccttcact

SEQ ID NO: 893 - DNA, 14 bp, Artificial sequence
  Synthetic oligonucleotide
aattttcccttcac

SEQ ID NO: 894 - DNA, 14 bp, Artificial sequence
  Synthetic oligonucleotide
taattttcccttca

SEQ ID NO: 895 - DNA, 14 bp, Artificial sequence
  Synthetic oligonucleotide
ttaattttcccttc

SEQ ID NO: 896 - DNA, 14 bp, Artificial sequence
  Synthetic oligonucleotide
gttaattttccctt

SEQ ID NO: 897 - DNA, 14 bp, Artificial sequence
  Synthetic oligonucleotide
tttatcatttcttt

SEQ ID NO: 898 - DNA, 14 bp, Artificial sequence
  Synthetic oligonucleotide
ttttatcatttctt

SEQ ID NO: 899 - DNA, 14 bp, Artificial sequence
  Synthetic oligonucleotide
cttttatcatttct

SEQ ID NO: 900 - DNA, 14 bp, Artificial sequence
  Synthetic oligonucleotide
tcttttatcatttc

SEQ ID NO: 901 - DNA, 14 bp, Artificial sequence
  Synthetic oligonucleotide
ttcttttatcattt

SEQ ID NO: 902 - DNA, 14 bp, Artificial sequence
  Synthetic oligonucleotide
cttcttttatcatt

SEQ ID NO: 903 - DNA, 14 bp, Artificial sequence
  Synthetic oligonucleotide
acttcttttatcat

SEQ ID NO: 904 - DNA, 14 bp, Artificial sequence
  Synthetic oligonucleotide
tacttcttttatca

SEQ ID NO: 905 - DNA, 14 bp, Artificial sequence
  Synthetic oligonucleotide
ttacttcttttatc

SEQ ID NO: 906 - DNA, 14 bp, Artificial sequence
  Synthetic oligonucleotide
attacttcttttat

SEQ ID NO: 907 - DNA, 14 bp, Artificial sequence
  Synthetic oligonucleotide
aattacttctttta

SEQ ID NO: 908 - DNA, 14 bp, Artificial sequence
  Synthetic oligonucleotide
aaattacttctttt

SEQ ID NO: 909 - DNA, 14 bp, Artificial sequence
  Synthetic oligonucleotide
aaaattacttcttt

SEQ ID NO: 910 - DNA, 14 bp, Artificial sequence
  Synthetic oligonucleotide
caaaattacttctt

SEQ ID NO: 911 - DNA, 14 bp, Artificial sequence
  Synthetic oligonucleotide
ccaaaattacttct

SEQ ID NO: 912 - DNA, 14 bp, Artificial sequence
  Synthetic oligonucleotide
tccaaaattacttc

SEQ ID NO: 913 - DNA, 14 bp, Artificial sequence
  Synthetic oligonucleotide
ttccaaaattactt

SEQ ID NO: 914 - DNA, 14 bp, Artificial sequence
  Synthetic oligonucleotide
gttccaaaattact

SEQ ID NO: 915 - DNA, 14 bp, Artificial sequence
  Synthetic oligonucleotide
tgttccaaaattac

SEQ ID NO: 916 - DNA, 14 bp, Artificial sequence
  Synthetic oligonucleotide
atgttccaaaatta

SEQ ID NO: 917 - DNA, 14 bp, Artificial sequence
  Synthetic oligonucleotide
ttactctttttatt

SEQ ID NO: 918 - DNA, 14 bp, Artificial sequence
  Synthetic oligonucleotide
tttactctttttat

SEQ ID NO: 919 - DNA, 14 bp, Artificial sequence
  Synthetic oligonucleotide
ttttactcttttta

SEQ ID NO: 920 - DNA, 14 bp, Artificial sequence
  Synthetic oligonucleotide
attttactcttttt

SEQ ID NO: 921 - DNA, 14 bp, Artificial sequence
  Synthetic oligonucleotide
tattttactctttt

SEQ ID NO: 922 - DNA, 14 bp, Artificial sequence
  Synthetic oligonucleotide
atattttactcttt

SEQ ID NO: 923 - DNA, 14 bp, Artificial sequence
  Synthetic oligonucleotide
catattttactctt

SEQ ID NO: 924 - DNA, 14 bp, Artificial sequence
  Synthetic oligonucleotide
ccatattttactct

SEQ ID NO: 925 - DNA, 14 bp, Artificial sequence
  Synthetic oligonucleotide
cccatattttactc

SEQ ID NO: 926 - DNA, 14 bp, Artificial sequence
  Synthetic oligonucleotide
acccatattttact

SEQ ID NO: 927 - DNA, 14 bp, Artificial sequence
  Synthetic oligonucleotide
tacccatattttac

SEQ ID NO: 928 - DNA, 14 bp, Artificial sequence
  Synthetic oligonucleotide
ttacccatatttta

SEQ ID NO: 929 - DNA, 14 bp, Artificial sequence
  Synthetic oligonucleotide
tttacccatatttt

SEQ ID NO: 930 - DNA, 14 bp, Artificial sequence
  Synthetic oligonucleotide
gtttacccatattt

SEQ ID NO: 931 - DNA, 14 bp, Artificial sequence
  Synthetic oligonucleotide
tgtttacccatatt

SEQ ID NO: 932 - DNA, 14 bp, Artificial sequence
  Synthetic oligonucleotide
gttacctcccttta

SEQ ID NO: 933 - DNA, 14 bp, Artificial sequence
  Synthetic oligonucleotide
ggttacctcccttt

SEQ ID NO: 934 - DNA, 14 bp, Artificial sequence
  Synthetic oligonucleotide
aggttacctccctt

SEQ ID NO: 935 - DNA, 14 bp, Artificial sequence
  Synthetic oligonucleotide
caaactaaaaccta

SEQ ID NO: 936 - DNA, 14 bp, Artificial sequence
  Synthetic oligonucleotide
tcaaactaaaacct

SEQ ID NO: 937 - DNA, 14 bp, Artificial sequence
  Synthetic oligonucleotide
atcaaactaaaacc

SEQ ID NO: 938 - DNA, 14 bp, Artificial sequence
  Synthetic oligonucleotide
gatcaaactaaaac

SEQ ID NO: 939 - DNA, 14 bp, Artificial sequence
  Synthetic oligonucleotide
agatcaaactaaaa

SEQ ID NO: 940 - DNA, 14 bp, Artificial sequence
  Synthetic oligonucleotide
aagatcaaactaaa

SEQ ID NO: 941 - DNA, 14 bp, Artificial sequence
  Synthetic oligonucleotide
ccaatttcacccaa

SEQ ID NO: 942 - DNA, 14 bp, Artificial sequence
  Synthetic oligonucleotide
cccaatttcaccca

SEQ ID NO: 943 - DNA, 14 bp, Artificial sequence
  Synthetic oligonucleotide
gcccaatttcaccc

SEQ ID NO: 944 - DNA, 14 bp, Artificial sequence
  Synthetic oligonucleotide
tgcccaatttcacc

SEQ ID NO: 945 - DNA, 14 bp, Artificial sequence
  Synthetic oligonucleotide
ttgcccaatttcac

SEQ ID NO: 946 - DNA, 14 bp, Artificial sequence
  Synthetic oligonucleotide
caactttctatttt

SEQ ID NO: 947 - DNA, 14 bp, Artificial sequence
  Synthetic oligonucleotide
ccaactttctattt

SEQ ID NO: 948 - DNA, 14 bp, Artificial sequence
  Synthetic oligonucleotide
cccaactttctatt

SEQ ID NO: 949 - DNA, 14 bp, Artificial sequence
  Synthetic oligonucleotide
acccaactttctat

SEQ ID NO: 950 - DNA, 14 bp, Artificial sequence
  Synthetic oligonucleotide
aacccaactttcta

SEQ ID NO: 951 - DNA, 14 bp, Artificial sequence
  Synthetic oligonucleotide
aaacccaactttct

SEQ ID NO: 952 - DNA, 14 bp, Artificial sequence
  Synthetic oligonucleotide
aaaacccaactttc

SEQ ID NO: 953 - DNA, 14 bp, Artificial sequence
  Synthetic oligonucleotide
aaaaacccaacttt

SEQ ID NO: 954 - DNA, 14 bp, Artificial sequence
  Synthetic oligonucleotide
caaaaacccaactt

SEQ ID NO: 955 - DNA, 14 bp, Artificial sequence
  Synthetic oligonucleotide
acaaaaacccaact

SEQ ID NO: 956 - DNA, 14 bp, Artificial sequence
  Synthetic oligonucleotide
ctttaaaatttcca

SEQ ID NO: 957 - DNA, 14 bp, Artificial sequence
  Synthetic oligonucleotide
tctttaaaatttcc

SEQ ID NO: 958 - DNA, 14 bp, Artificial sequence
  Synthetic oligonucleotide
ttctttaaaatttc

SEQ ID NO: 959 - DNA, 14 bp, Artificial sequence
  Synthetic oligonucleotide
tttctttaaaattt

SEQ ID NO: 960 - DNA, 14 bp, Artificial sequence
  Synthetic oligonucleotide
atttctttaaaatt

SEQ ID NO: 961 - DNA, 14 bp, Artificial sequence
  Synthetic oligonucleotide
catttctttaaaat

SEQ ID NO: 962 - DNA, 14 bp, Artificial sequence
  Synthetic oligonucleotide
acatttctttaaaa

SEQ ID NO: 963 - DNA, 14 bp, Artificial sequence
  Synthetic oligonucleotide
cacatttctttaaa

SEQ ID NO: 964 - DNA, 14 bp, Artificial sequence
  Synthetic oligonucleotide
ccacatttctttaa

SEQ ID NO: 965 - DNA, 14 bp, Artificial sequence
  Synthetic oligonucleotide
accacatttcttta

SEQ ID NO: 966 - DNA, 14 bp, Artificial sequence
  Synthetic oligonucleotide
aaccacatttcttt

SEQ ID NO: 967 - DNA, 14 bp, Artificial sequence
  Synthetic oligonucleotide
aaaccacatttctt

SEQ ID NO: 968 - DNA, 14 bp, Artificial sequence
  Synthetic oligonucleotide
aaaaccacatttct

SEQ ID NO: 969 - DNA, 14 bp, Artificial sequence
  Synthetic oligonucleotide
caaaaccacatttc

SEQ ID NO: 970 - DNA, 14 bp, Artificial sequence
  Synthetic oligonucleotide
ttcttctcttttca

SEQ ID NO: 971 - DNA, 14 bp, Artificial sequence
  Synthetic oligonucleotide
tttcttctcttttc

SEQ ID NO: 972 - DNA, 14 bp, Artificial sequence
  Synthetic oligonucleotide
ttttcttctctttt

SEQ ID NO: 973 - DNA, 14 bp, Artificial sequence
  Synthetic oligonucleotide
tttttcttctcttt

SEQ ID NO: 974 - DNA, 14 bp, Artificial sequence
  Synthetic oligonucleotide
ttttttcttctctt

SEQ ID NO: 975 - DNA, 14 bp, Artificial sequence
  Synthetic oligonucleotide
attttttcttctct

SEQ ID NO: 976 - DNA, 14 bp, Artificial sequence
  Synthetic oligonucleotide
tattttttcttctc

SEQ ID NO: 977 - DNA, 14 bp, Artificial sequence
  Synthetic oligonucleotide
aacttaatattaaa

SEQ ID NO: 978 - DNA, 14 bp, Artificial sequence
  Synthetic oligonucleotide
caacttaatattaa

SEQ ID NO: 979 - DNA, 14 bp, Artificial sequence
  Synthetic oligonucleotide
tcaacttaatatta

SEQ ID NO: 980 - DNA, 14 bp, Artificial sequence
  Synthetic oligonucleotide
ttcaacttaatatt

SEQ ID NO: 981 - DNA, 14 bp, Artificial sequence
  Synthetic oligonucleotide
attcaacttaatat

SEQ ID NO: 982 - DNA, 14 bp, Artificial sequence
  Synthetic oligonucleotide
tattcaacttaata

SEQ ID NO: 983 - DNA, 14 bp, Artificial sequence
  Synthetic oligonucleotide
ttattcaacttaat

SEQ ID NO: 984 - DNA, 14 bp, Artificial sequence
  Synthetic oligonucleotide
tttattcaacttaa

SEQ ID NO: 985 - DNA, 14 bp, Artificial sequence
  Synthetic oligonucleotide
caaattaaaaaaca

SEQ ID NO: 986 - DNA, 14 bp, Artificial sequence
  Synthetic oligonucleotide
tcaaattaaaaaac

SEQ ID NO: 987 - DNA, 14 bp, Artificial sequence
  Synthetic oligonucleotide
ttcaaattaaaaaa

SEQ ID NO: 988 - DNA, 14 bp, Artificial sequence
  Synthetic oligonucleotide
cttcaaattaaaaa

SEQ ID NO: 989 - DNA, 14 bp, Artificial sequence
  Synthetic oligonucleotide
tcttcaaattaaaa

SEQ ID NO: 990 - DNA, 14 bp, Artificial sequence
  Synthetic oligonucleotide
ttcttcaaattaaa

SEQ ID NO: 991 - DNA, 14 bp, Artificial sequence
  Synthetic oligonucleotide
tttcttcaaattaa

SEQ ID NO: 992 - DNA, 14 bp, Artificial sequence
  Synthetic oligonucleotide
aacacaaattcaaa

SEQ ID NO: 993 - DNA, 14 bp, Artificial sequence
  Synthetic oligonucleotide
aaacacaaattcaa

SEQ ID NO: 994 - DNA, 14 bp, Artificial sequence
  Synthetic oligonucleotide
taaacacaaattca

SEQ ID NO: 995 - DNA, 14 bp, Artificial sequence
  Synthetic oligonucleotide
ataaacacaaattc

SEQ ID NO: 996 - DNA, 14 bp, Artificial sequence
  Synthetic oligonucleotide
aataaacacaaatt

SEQ ID NO: 997 - DNA, 14 bp, Artificial sequence
  Synthetic oligonucleotide
caataaacacaaat

SEQ ID NO: 998 - DNA, 14 bp, Artificial sequence
  Synthetic oligonucleotide
acaataaacacaaa

SEQ ID NO: 999 - DNA, 14 bp, Artificial sequence
  Synthetic oligonucleotide
aacaataaacacaa

SEQ ID NO: 1000 - DNA, 14 bp, Artificial sequence
  Synthetic oligonucleotide
taacaataaacaca

SEQ ID NO: 1001 - DNA, 14 bp, Artificial sequence
  Synthetic oligonucleotide
ttaacaataaacac

SEQ ID NO: 1002 - DNA, 14 bp, Artificial sequence
  Synthetic oligonucleotide
attaacaataaaca

SEQ ID NO: 1003 - DNA, 14 bp, Artificial sequence
  Synthetic oligonucleotide
aattaacaataaac

SEQ ID NO: 1004 - DNA, 14 bp, Artificial sequence
  Synthetic oligonucleotide
gaattaacaataaa

SEQ ID NO: 1005 - DNA, 14 bp, Artificial sequence
  Synthetic oligonucleotide
tgaattaacaataa

SEQ ID NO: 1006 - DNA, 14 bp, Artificial sequence
  Synthetic oligonucleotide
atattcctcaatca

SEQ ID NO: 1007 - DNA, 14 bp, Artificial sequence
  Synthetic oligonucleotide
tatattcctcaatc

SEQ ID NO: 1008 - DNA, 14 bp, Artificial sequence
  Synthetic oligonucleotide
atatattcctcaat

SEQ ID NO: 1009 - DNA, 14 bp, Artificial sequence
  Synthetic oligonucleotide
aatatattcctcaa

SEQ ID NO: 1010 - DNA, 14 bp, Artificial sequence
  Synthetic oligonucleotide
caatatattcctca

SEQ ID NO: 1011 - DNA, 14 bp, Artificial sequence
  Synthetic oligonucleotide
acaatatattcctc

SEQ ID NO: 1012 - DNA, 14 bp, Artificial sequence
  Synthetic oligonucleotide
gacaatatattcct

SEQ ID NO: 1013 - DNA, 14 bp, Artificial sequence
  Synthetic oligonucleotide
caatcctaattaaa

SEQ ID NO: 1014 - DNA, 14 bp, Artificial sequence
  Synthetic oligonucleotide
ccaatcctaattaa

SEQ ID NO: 1015 - DNA, 14 bp, Artificial sequence
  Synthetic oligonucleotide
cccaatcctaatta

SEQ ID NO: 1016 - DNA, 14 bp, Artificial sequence
  Synthetic oligonucleotide
gcccaatcctaatt

SEQ ID NO: 1017 - DNA, 14 bp, Artificial sequence
  Synthetic oligonucleotide
tgcccaatcctaat

SEQ ID NO: 1018 - DNA, 14 bp, Artificial sequence
  Synthetic oligonucleotide
accctacaaatact

SEQ ID NO: 1019 - DNA, 14 bp, Artificial sequence
  Synthetic oligonucleotide
aaccctacaaatac

SEQ ID NO: 1020 - DNA, 14 bp, Artificial sequence
  Synthetic oligonucleotide
aaaccctacaaata

SEQ ID NO: 1021 - DNA, 14 bp, Artificial sequence
  Synthetic oligonucleotide
aaaaccctacaaat

SEQ ID NO: 1022 - DNA, 14 bp, Artificial sequence
  Synthetic oligonucleotide
aaaaaccctacaaa

SEQ ID NO: 1023 - DNA, 14 bp, Artificial sequence
  Synthetic oligonucleotide
aaaaaaccctacaa

SEQ ID NO: 1024 - DNA, 14 bp, Artificial sequence
  Synthetic oligonucleotide
aaaaaaaccctaca

SEQ ID NO: 1025 - DNA, 14 bp, Artificial sequence
  Synthetic oligonucleotide
tatacactattaat

SEQ ID NO: 1026 - DNA, 14 bp, Artificial sequence
  Synthetic oligonucleotide
ttatacactattaa

SEQ ID NO: 1027 - DNA, 14 bp, Artificial sequence
  Synthetic oligonucleotide
attatacactatta

SEQ ID NO: 1028 - DNA, 14 bp, Artificial sequence
  Synthetic oligonucleotide
aattatacactatt

SEQ ID NO: 1029 - DNA, 14 bp, Artificial sequence
  Synthetic oligonucleotide
gaattatacactat

SEQ ID NO: 1030 - DNA, 14 bp, Artificial sequence
  Synthetic oligonucleotide
gtaacaattataca

SEQ ID NO: 1031 - DNA, 14 bp, Artificial sequence
  Synthetic oligonucleotide
tgtaacaattatac

SEQ ID NO: 1032 - DNA, 14 bp, Artificial sequence
  Synthetic oligonucleotide
ctgtaacaattata

SEQ ID NO: 1033 - DNA, 14 bp, Artificial sequence
  Synthetic oligonucleotide
cctgtaacaattat

SEQ ID NO: 1034 - DNA, 14 bp, Artificial sequence
  Synthetic oligonucleotide
tcctgtaacaatta

SEQ ID NO: 1035 - DNA, 14 bp, Artificial sequence
  Synthetic oligonucleotide
ataaaaaccacctt

SEQ ID NO: 1036 - DNA, 14 bp, Artificial sequence
  Synthetic oligonucleotide
aataaaaaccacct

SEQ ID NO: 1037 - DNA, 14 bp, Artificial sequence
  Synthetic oligonucleotide
gaataaaaaccacc

SEQ ID NO: 1038 - DNA, 14 bp, Artificial sequence
  Synthetic oligonucleotide
agaataaaaaccac

SEQ ID NO: 1039 - DNA, 14 bp, Artificial sequence
  Synthetic oligonucleotide
cagaataaaaacca

SEQ ID NO: 1040 - DNA, 14 bp, Artificial sequence
  Synthetic oligonucleotide
ccagaataaaaacc

SEQ ID NO: 1041 - DNA, 14 bp, Artificial sequence
  Synthetic oligonucleotide
cccagaataaaaac

SEQ ID NO: 1042 - DNA, 14 bp, Artificial sequence
  Synthetic oligonucleotide
acccagaataaaaa

SEQ ID NO: 1043 - DNA, 14 bp, Artificial sequence
  Synthetic oligonucleotide
tttcttactcccct

SEQ ID NO: 1044 - DNA, 14 bp, Artificial sequence
  Synthetic oligonucleotide
ctttcttactcccc

SEQ ID NO: 1045 - DNA, 14 bp, Artificial sequence
  Synthetic oligonucleotide
actttcttactccc

SEQ ID NO: 1046 - DNA, 14 bp, Artificial sequence
  Synthetic oligonucleotide
cactttcttactcc

SEQ ID NO: 1047 - DNA, 14 bp, Artificial sequence
  Synthetic oligonucleotide
ccactttcttactc

SEQ ID NO: 1048 - DNA, 14 bp, Artificial sequence
  Synthetic oligonucleotide
cctttaccactttt

SEQ ID NO: 1049 - DNA, 14 bp, Artificial sequence
  Synthetic oligonucleotide
ccctttaccacttt

SEQ ID NO: 1050 - DNA, 14 bp, Artificial sequence
  Synthetic oligonucleotide
tccctttaccactt

SEQ ID NO: 1051 - DNA, 14 bp, Artificial sequence
  Synthetic oligonucleotide
atccctttaccact

SEQ ID NO: 1052 - DNA, 14 bp, Artificial sequence
  Synthetic oligonucleotide
catccctttaccac

SEQ ID NO: 1053 - DNA, 14 bp, Artificial sequence
  Synthetic oligonucleotide
ctacatctaacccc

SEQ ID NO: 1054 - DNA, 14 bp, Artificial sequence
  Synthetic oligonucleotide
tctacatctaaccc

SEQ ID NO: 1055 - DNA, 14 bp, Artificial sequence
  Synthetic oligonucleotide
gtctacatctaacc

SEQ ID NO: 1056 - DNA, 14 bp, Artificial sequence
  Synthetic oligonucleotide
agtctacatctaac

SEQ ID NO: 1057 - DNA, 14 bp, Artificial sequence
  Synthetic oligonucleotide
cagtctacatctaa

SEQ ID NO: 1058 - DNA, 14 bp, Artificial sequence
  Synthetic oligonucleotide
tcagtctacatcta

SEQ ID NO: 1059 - DNA, 14 bp, Artificial sequence
  Synthetic oligonucleotide
ttcagtctacatct

SEQ ID NO: 1060 - DNA, 14 bp, Artificial sequence
  Synthetic oligonucleotide
taaccacacctcct

SEQ ID NO: 1061 - DNA, 14 bp, Artificial sequence
  Synthetic oligonucleotide
ttaaccacacctcc

SEQ ID NO: 1062 - DNA, 14 bp, Artificial sequence
  Synthetic oligonucleotide
tttaaccacacctc

SEQ ID NO: 1063 - DNA, 14 bp, Artificial sequence
  Synthetic oligonucleotide
ttttaaccacacct

SEQ ID NO: 1064 - DNA, 14 bp, Artificial sequence
  Synthetic oligonucleotide
gttttaaccacacc

SEQ ID NO: 1065 - DNA, 14 bp, Artificial sequence
  Synthetic oligonucleotide
agttttaaccacac

SEQ ID NO: 1066 - DNA, 14 bp, Artificial sequence
  Synthetic oligonucleotide
caacaaaacatcaa

SEQ ID NO: 1067 - DNA, 14 bp, Artificial sequence
  Synthetic oligonucleotide
tcaacaaaacatca

SEQ ID NO: 1068 - DNA, 14 bp, Artificial sequence
  Synthetic oligonucleotide
ttcaacaaaacatc

SEQ ID NO: 1069 - DNA, 14 bp, Artificial sequence
  Synthetic oligonucleotide
tttcaacaaaacat

SEQ ID NO: 1070 - DNA, 14 bp, Artificial sequence
  Synthetic oligonucleotide
ttttcaacaaaaca

SEQ ID NO: 1071 - DNA, 14 bp, Artificial sequence
  Synthetic oligonucleotide
gttttcaacaaaac

SEQ ID NO: 1072 - DNA, 14 bp, Artificial sequence
  Synthetic oligonucleotide
tgttttcaacaaaa

SEQ ID NO: 1073 - DNA, 14 bp, Artificial sequence
  Synthetic oligonucleotide
ttctaaaacttacc

SEQ ID NO: 1074 - DNA, 14 bp, Artificial sequence
  Synthetic oligonucleotide
tttctaaaacttac

SEQ ID NO: 1075 - DNA, 14 bp, Artificial sequence
  Synthetic oligonucleotide
ctttctaaaactta

SEQ ID NO: 1076 - DNA, 14 bp, Artificial sequence
  Synthetic oligonucleotide
tctttctaaaactt

SEQ ID NO: 1077 - DNA, 14 bp, Artificial sequence
  Synthetic oligonucleotide
atctttctaaaact

SEQ ID NO: 1078 - DNA, 14 bp, Artificial sequence
  Synthetic oligonucleotide
aatctttctaaaac

SEQ ID NO: 1079 - DNA, 14 bp, Artificial sequence
  Synthetic oligonucleotide
gaatctttctaaaa

SEQ ID NO: 1080 - DNA, 14 bp, Artificial sequence
  Synthetic oligonucleotide
agaatctttctaaa

SEQ ID NO: 1081 - DNA, 14 bp, Artificial sequence
  Synthetic oligonucleotide
cagaatctttctaa

SEQ ID NO: 1082 - DNA, 14 bp, Artificial sequence
  Synthetic oligonucleotide
cctttatttccctt

SEQ ID NO: 1083 - DNA, 14 bp, Artificial sequence
  Synthetic oligonucleotide
ccctttatttccct

SEQ ID NO: 1084 - DNA, 14 bp, Artificial sequence
  Synthetic oligonucleotide
tccctttatttccc

SEQ ID NO: 1085 - DNA, 14 bp, Artificial sequence
  Synthetic oligonucleotide
ttccctttatttcc

SEQ ID NO: 1086 - DNA, 14 bp, Artificial sequence
  Synthetic oligonucleotide
tttccctttatttc

SEQ ID NO: 1087 - DNA, 14 bp, Artificial sequence
  Synthetic oligonucleotide
atttccctttattt

SEQ ID NO: 1088 - DNA, 14 bp, Artificial sequence
  Synthetic oligonucleotide
tatttccctttatt

SEQ ID NO: 1089 - DNA, 14 bp, Artificial sequence
  Synthetic oligonucleotide
gtatttccctttat

SEQ ID NO: 1090 - DNA, 27 bp, Artificial
  Probe
ctgaacagcctccttggtcttcttgta

SEQ ID NO: 1091 - DNA, 21 bp, artificial
  Primer
cttgccagctctcattctctg

SEQ ID NO: 1092 - DNA, 21 bp, Artificial
  Primer
tggtggttgaagataaggttg

SEQ ID NO: 1093 - DNA, 17 bp, Homo sapiens
aagagtaaaatatgggt

SEQ ID NO: 1094 - DNA, 18 bp, Homo sapiens
gaatgtaaaagtgtacag

SEQ ID NO: 1095 - DNA, 18 bp, Homo sapiens
ggaatgtaaaagtgtaca

SEQ ID NO: 1096 - DNA, 18 bp, Homo sapiens
gggaatgtaaaagtgtac

SEQ ID NO: 1097 - DNA, 19 bp, Homo sapiens
ttgatggtataatgaagaa

SEQ ID NO: 1098 - DNA, 19 bp, Homo sapiens
ggaagatgtaaataagatt

SEQ ID NO: 1099 - DNA, 18 bp, Artificial sequence
  Synthetic oligonucleotide
ccaaaagaaaccaaaccc

SEQ ID NO: 1100 - DNA, 19 bp, Artificial sequence
  Synthetic oligonucleotide
ccccattcaaatatttatt

SEQ ID NO: 1101 - DNA, 17 bp, Artificial sequence
  Synthetic oligonucleotide
aatcatttacccccaac

SEQ ID NO: 1102 - DNA, 18 bp, Artificial sequence
  Synthetic oligonucleotide
tatctcaaactatcccca

SEQ ID NO: 1103 - DNA, 18 bp, Artificial sequence
  Synthetic oligonucleotide
tctattccttaacccaac

SEQ ID NO: 1104 - DNA, 20 bp, Artificial sequence
  Synthetic oligonucleotide
tcccctaaataatttaatca

SEQ ID NO: 1105 - DNA, 17 bp, Artificial sequence
  Synthetic oligonucleotide
aaaccactccattccaa

SEQ ID NO: 1106 - DNA, 19 bp, Artificial sequence
  Synthetic oligonucleotide
tctaaaccccaaactttca

SEQ ID NO: 1107 - DNA, 19 bp, Artificial sequence
  Synthetic oligonucleotide
ttctaaaccccaaactttc

SEQ ID NO: 1108 - DNA, 18 bp, Artificial sequence
  Synthetic oligonucleotide
agttctaaaccccaaact

SEQ ID NO: 1109 - DNA, 19 bp, Artificial sequence
  Synthetic oligonucleotide
tgaaaccattactacaacc

SEQ ID NO: 1110 - DNA, 20 bp, Artificial sequence
  Synthetic oligonucleotide
acatcatttatcactaccac

SEQ ID NO: 1111 - DNA, 17 bp, Artificial sequence
  Synthetic oligonucleotide
aacattaaaccctccca

SEQ ID NO: 1112 - DNA, 18 bp, Artificial sequence
  Synthetic oligonucleotide
tcagatcctaaaatcact

SEQ ID NO: 1113 - DNA, 19 bp, Artificial sequence
  Synthetic oligonucleotide
ctatacctaaaacaatcta

SEQ ID NO: 1114 - DNA, 18 bp, Artificial sequence
  Synthetic oligonucleotide
tgattcttatacttacta

SEQ ID NO: 1115 - DNA, 20 bp, Artificial sequence
  Synthetic oligonucleotide
taaaaatataactactccta

SEQ ID NO: 1116 - DNA, 20 bp, Artificial sequence
  Synthetic oligonucleotide
tcttcattataccatcaaat

SEQ ID NO: 1117 - DNA, 18 bp, Artificial sequence
  Synthetic oligonucleotide
gtttcatatttttaatcc

SEQ ID NO: 1118 - DNA, 20 bp, Artificial sequence
  Synthetic oligonucleotide
taatatcctcattacccatt

SEQ ID NO: 1119 - DNA, 19 bp, Artificial sequence
  Synthetic oligonucleotide
caaatattcacaaatccta

SEQ ID NO: 1120 - DNA, 20 bp, Artificial sequence
  Synthetic oligonucleotide
catcacaaaataacctatca

SEQ ID NO: 1121 - DNA, 20 bp, Artificial sequence
  Synthetic oligonucleotide
ctctcaacttctactactaa

SEQ ID NO: 1122 - DNA, 19 bp, Artificial sequence
  Synthetic oligonucleotide
aatcttatttacatcttcc

SEQ ID NO: 1123 - DNA, 20 bp, Artificial sequence
  Synthetic oligonucleotide
ccaaaattacttcttttatc

SEQ ID NO: 1124 - DNA, 18 bp, Artificial sequence
  Synthetic oligonucleotide
aacccaactttctatttt

SEQ ID NO: 1125 - DNA, 19 bp, Artificial sequence
  Synthetic oligonucleotide
acaatatattcctcaatca

SEQ ID NO: 1126 - DNA, 17 bp, Artificial sequence
  Synthetic oligonucleotide
cctgtaacaattataca

SEQ ID NO: 1127 - DNA, 17 bp, Artificial sequence
  Synthetic oligonucleotide
catccctttaccacttt

SEQ ID NO: 1128 - DNA, 23 bp, artificial
  Primer
gtttctaaagacatggtcacagc

SEQ ID NO: 1129 - DNA, 23 bp, artificial
  Primer
ctatcaggacagagttcacatcc

SEQ ID NO: 1130 - DNA, 22 bp, artificial
  FAM labelled probe
aaaggccagccaccagttcagg

SEQ ID NO: 1131 - DNA, 25 bp, artificial
  FAM labelled probe
tgatctttgcagtgacccagcatca

SEQ ID NO: 1132 - DNA, 20 bp, artificial
  Primer
gctgtttaacttcgcttccg

SEQ ID NO: 1133 - DNA, 21 bp, artificial
  Primer
cagcaacttcctcaattcctt

SEQ ID NO: 1134 - DNA, 24 bp, artificial
  FAM lebelled probe
ctccgcagggctattcagctaagt

SEQ ID NO: 1135 - DNA, 25 bp, artificial
  Primer
agtaagatttgtacctgatgtctgt

SEQ ID NO: 1136 - DNA, 22 bp, artificial
  Primer
catggaagatgaggaagcagat

SEQ ID NO: 1137 - DNA, 17 bp, Artificial sequence
  Synthetic oligonucleotide
cctacttcacttcctaa

SEQ ID NO: 1138 - DNA, 19 bp, Artificial sequence
  Synthetic oligonucleotide
tttcctacttcacttccta

SEQ ID NO: 1139 - DNA, 18 bp, Artificial sequence
  Synthetic oligonucleotide
ttcctacttcacttccta

SEQ ID NO: 1140 - DNA, 18 bp, Artificial sequence
  Synthetic oligonucleotide
tttcctacttcacttcct

SEQ ID NO: 1141 - DNA, 17 bp, Artificial sequence
  Synthetic oligonucleotide
tttcctacttcacttcc

SEQ ID NO: 1142 - DNA, 17 bp, Artificial sequence
  Synthetic oligonucleotide
gtttcctacttcacttc

SEQ ID NO: 1143 - DNA, 18 bp, Artificial sequence
  Synthetic oligonucleotide
accaaacccaaacatccc

SEQ ID NO: 1144 - DNA, 20 bp, Artificial sequence
  Synthetic oligonucleotide
agaaaccaaacccaaacatc

SEQ ID NO: 1145 - DNA, 19 bp, Artificial sequence
  Synthetic oligonucleotide
agaaaccaaacccaaacat

SEQ ID NO: 1146 - DNA, 21 bp, Artificial sequence
  Synthetic oligonucleotide
ctcctaatacctaaaaacaaa

SEQ ID NO: 1147 - DNA, 19 bp, Artificial sequence
  Synthetic oligonucleotide
ctcctaatacctaaaaaca

SEQ ID NO: 1148 - DNA, 20 bp, Artificial sequence
  Synthetic oligonucleotide
actcctaatacctaaaaaca

SEQ ID NO: 1149 - DNA, 21 bp, Artificial sequence
  Synthetic oligonucleotide
cactcctaatacctaaaaaca

SEQ ID NO: 1150 - DNA, 20 bp, Artificial sequence
  Synthetic oligonucleotide
ccactcctaatacctaaaaa

SEQ ID NO: 1151 - DNA, 21 bp, Artificial sequence
  Synthetic oligonucleotide
tccactcctaatacctaaaaa

SEQ ID NO: 1152 - DNA, 19 bp, Artificial sequence
  Synthetic oligonucleotide
ccactcctaatacctaaaa

SEQ ID NO: 1153 - DNA, 20 bp, Artificial sequence
  Synthetic oligonucleotide
tccactcctaatacctaaaa

SEQ ID NO: 1154 - DNA, 18 bp, Artificial sequence
  Synthetic oligonucleotide
ccactcctaatacctaaa

SEQ ID NO: 1155 - DNA, 20 bp, Artificial sequence
  Synthetic oligonucleotide
gtccactcctaatacctaaa

SEQ ID NO: 1156 - DNA, 17 bp, Artificial sequence
  Synthetic oligonucleotide
ccactcctaatacctaa

SEQ ID NO: 1157 - DNA, 18 bp, Artificial sequence
  Synthetic oligonucleotide
tccactcctaatacctaa

SEQ ID NO: 1158 - DNA, 19 bp, Artificial sequence
  Synthetic oligonucleotide
gtccactcctaatacctaa

SEQ ID NO: 1159 - DNA, 19 bp, Artificial sequence
  Synthetic oligonucleotide
agtccactcctaataccta

SEQ ID NO: 1160 - DNA, 17 bp, Artificial sequence
  Synthetic oligonucleotide
tccactcctaataccta

SEQ ID NO: 1161 - DNA, 18 bp, Artificial sequence
  Synthetic oligonucleotide
agtccactcctaatacct

SEQ ID NO: 1162 - DNA, 16 bp, Artificial sequence
  Synthetic oligonucleotide
gtccactcctaatacc

SEQ ID NO: 1163 - DNA, 17 bp, Artificial sequence
  Synthetic oligonucleotide
agtccactcctaatacc

SEQ ID NO: 1164 - DNA, 18 bp, Artificial sequence
  Synthetic oligonucleotide
cagtccactcctaatacc

SEQ ID NO: 1165 - DNA, 18 bp, Artificial sequence
  Synthetic oligonucleotide
ccagtccactcctaatac

SEQ ID NO: 1166 - DNA, 17 bp, Artificial sequence
  Synthetic oligonucleotide
cagtccactcctaatac

SEQ ID NO: 1167 - DNA, 16 bp, Artificial sequence
  Synthetic oligonucleotide
agtccactcctaatac

SEQ ID NO: 1168 - DNA, 16 bp, Artificial sequence
  Synthetic oligonucleotide
cagtccactcctaata

SEQ ID NO: 1169 - DNA, 17 bp, Artificial sequence
  Synthetic oligonucleotide
ccagtccactcctaata

SEQ ID NO: 1170 - DNA, 17 bp, Artificial sequence
  Synthetic oligonucleotide
gcaactctttccaaaca

SEQ ID NO: 1171 - DNA, 18 bp, Artificial sequence
  Synthetic oligonucleotide
agcaactctttccaaaca

SEQ ID NO: 1172 - DNA, 19 bp, Artificial sequence
  Synthetic oligonucleotide
cagcaactctttccaaaca

SEQ ID NO: 1173 - DNA, 18 bp, Artificial sequence
  Synthetic oligonucleotide
ccagcaactctttccaaa

SEQ ID NO: 1174 - DNA, 17 bp, Artificial sequence
  Synthetic oligonucleotide
ccagcaactctttccaa

SEQ ID NO: 1175 - DNA, 18 bp, Artificial sequence
  Synthetic oligonucleotide
accagcaactctttccaa

SEQ ID NO: 1176 - DNA, 17 bp, Artificial sequence
  Synthetic oligonucleotide
ttaccagcaactctttc

SEQ ID NO: 1177 - DNA, 19 bp, Artificial sequence
  Synthetic oligonucleotide
tgctcctcctattaaataa

SEQ ID NO: 1178 - DNA, 18 bp, Artificial sequence
  Synthetic oligonucleotide
gctcctcctattaaataa

SEQ ID NO: 1179 - DNA, 17 bp, Artificial sequence
  Synthetic oligonucleotide
gctcctcctattaaata

SEQ ID NO: 1180 - DNA, 18 bp, Artificial sequence
  Synthetic oligonucleotide
tgctcctcctattaaata

SEQ ID NO: 1181 - DNA, 17 bp, Artificial sequence
  Synthetic oligonucleotide
tgctcctcctattaaat

SEQ ID NO: 1182 - DNA, 18 bp, Artificial sequence
  Synthetic oligonucleotide
ttgctcctcctattaaat

SEQ ID NO: 1183 - DNA, 21 bp, Artificial sequence
  Synthetic oligonucleotide
atttaataaaacaaaaaccct

SEQ ID NO: 1184 - DNA, 17 bp, Artificial sequence
  Synthetic oligonucleotide
gcccaaaaaactaaatt

SEQ ID NO: 1185 - DNA, 18 bp, Artificial sequence
  Synthetic oligonucleotide
gtttttacattctaactt

SEQ ID NO: 1186 - DNA, 18 bp, Artificial sequence
  Synthetic oligonucleotide
tgtttttacattctaact

SEQ ID NO: 1187 - DNA, 18 bp, Artificial sequence
  Synthetic oligonucleotide
ctgtttttacattctaac

SEQ ID NO: 1188 - DNA, 18 bp, Artificial sequence
  Synthetic oligonucleotide
ccccattcaaatatttat

SEQ ID NO: 1189 - DNA, 19 bp, Artificial sequence
  Synthetic oligonucleotide
gccccattcaaatatttat

SEQ ID NO: 1190 - DNA, 18 bp, Artificial sequence
  Synthetic oligonucleotide
gccccattcaaatattta

SEQ ID NO: 1191 - DNA, 21 bp, Artificial sequence
  Synthetic oligonucleotide
ccattcaaatatatacatttt

SEQ ID NO: 1192 - DNA, 21 bp, Artificial sequence
  Synthetic oligonucleotide
tccattcaaatatatacattt

SEQ ID NO: 1193 - DNA, 21 bp, Artificial sequence
  Synthetic oligonucleotide
atccattcaaatatatacatt

SEQ ID NO: 1194 - DNA, 20 bp, Artificial sequence
  Synthetic oligonucleotide
tccattcaaatatatacatt

SEQ ID NO: 1195 - DNA, 21 bp, Artificial sequence
  Synthetic oligonucleotide
tatccattcaaatatatacat

SEQ ID NO: 1196 - DNA, 19 bp, Artificial sequence
  Synthetic oligonucleotide
tccattcaaatatatacat

SEQ ID NO: 1197 - DNA, 19 bp, Artificial sequence
  Synthetic oligonucleotide
atccattcaaatatataca

SEQ ID NO: 1198 - DNA, 21 bp, Artificial sequence
  Synthetic oligonucleotide
ttatccattcaaatatataca

SEQ ID NO: 1199 - DNA, 18 bp, Artificial sequence
  Synthetic oligonucleotide
tccattcaaatatataca

SEQ ID NO: 1200 - DNA, 20 bp, Artificial sequence
  Synthetic oligonucleotide
tatccattcaaatatataca

SEQ ID NO: 1201 - DNA, 21 bp, Artificial sequence
  Synthetic oligonucleotide
ctttatccattcaaatatata

SEQ ID NO: 1202 - DNA, 21 bp, Artificial sequence
  Synthetic oligonucleotide
tctttatccattcaaatatat

SEQ ID NO: 1203 - DNA, 21 bp, Artificial sequence
  Synthetic oligonucleotide
ctctttatccattcaaatata

SEQ ID NO: 1204 - DNA, 20 bp, Artificial sequence
  Synthetic oligonucleotide
tctttatccattcaaatata

SEQ ID NO: 1205 - DNA, 19 bp, Artificial sequence
  Synthetic oligonucleotide
ctttatccattcaaatata

SEQ ID NO: 1206 - DNA, 21 bp, Artificial sequence
  Synthetic oligonucleotide
tctctttatccattcaaatat

SEQ ID NO: 1207 - DNA, 20 bp, Artificial sequence
  Synthetic oligonucleotide
ctctttatccattcaaatat

SEQ ID NO: 1208 - DNA, 19 bp, Artificial sequence
  Synthetic oligonucleotide
tctttatccattcaaatat

SEQ ID NO: 1209 - DNA, 20 bp, Artificial sequence
  Synthetic oligonucleotide
tctctttatccattcaaata

SEQ ID NO: 1210 - DNA, 19 bp, Artificial sequence
  Synthetic oligonucleotide
ctctttatccattcaaata

SEQ ID NO: 1211 - DNA, 19 bp, Artificial sequence
  Synthetic oligonucleotide
tctctttatccattcaaat

SEQ ID NO: 1212 - DNA, 18 bp, Artificial sequence
  Synthetic oligonucleotide
tctctttatccattcaaa

SEQ ID NO: 1213 - DNA, 18 bp, Artificial sequence
  Synthetic oligonucleotide
agcaccatatatatctca

SEQ ID NO: 1214 - DNA, 17 bp, Artificial sequence
  Synthetic oligonucleotide
gcaccatatatatctca

SEQ ID NO: 1215 - DNA, 19 bp, Artificial sequence
  Synthetic oligonucleotide
cagcaccatatatatctca

SEQ ID NO: 1216 - DNA, 17 bp, Artificial sequence
  Synthetic oligonucleotide
agcaccatatatatctc

SEQ ID NO: 1217 - DNA, 16 bp, Artificial sequence
  Synthetic oligonucleotide
gcaccatatatatctc

SEQ ID NO: 1218 - DNA, 18 bp, Artificial sequence
  Synthetic oligonucleotide
cagcaccatatatatctc

SEQ ID NO: 1219 - DNA, 17 bp, Artificial sequence
  Synthetic oligonucleotide
cagcaccatatatatct

SEQ ID NO: 1220 - DNA, 18 bp, Artificial sequence
  Synthetic oligonucleotide
acagcaccatatatatct

SEQ ID NO: 1221 - DNA, 17 bp, Artificial sequence
  Synthetic oligonucleotide
acagcaccatatatatc

SEQ ID NO: 1222 - DNA, 17 bp, Artificial sequence
  Synthetic oligonucleotide
ctatgttattatcccca

SEQ ID NO: 1223 - DNA, 17 bp, Artificial sequence
  Synthetic oligonucleotide
tctatgttattatcccc

SEQ ID NO: 1224 - DNA, 17 bp, Artificial sequence
  Synthetic oligonucleotide
ctctacactctaactct

SEQ ID NO: 1225 - DNA, 18 bp, Artificial sequence
  Synthetic oligonucleotide
tctctacactctaactct

SEQ ID NO: 1226 - DNA, 19 bp, Artificial sequence
  Synthetic oligonucleotide
ttctctacactctaactct

SEQ ID NO: 1227 - DNA, 20 bp, Artificial sequence
  Synthetic oligonucleotide
cttctctacactctaactct

SEQ ID NO: 1228 - DNA, 18 bp, Artificial sequence
  Synthetic oligonucleotide
ttctctacactctaactc

SEQ ID NO: 1229 - DNA, 19 bp, Artificial sequence
  Synthetic oligonucleotide
cttctctacactctaactc

SEQ ID NO: 1230 - DNA, 17 bp, Artificial sequence
  Synthetic oligonucleotide
tctctacactctaactc

SEQ ID NO: 1231 - DNA, 20 bp, Artificial sequence
  Synthetic oligonucleotide
ccttctctacactctaactc

SEQ ID NO: 1232 - DNA, 17 bp, Artificial sequence
  Synthetic oligonucleotide
ttctctacactctaact

SEQ ID NO: 1233 - DNA, 18 bp, Artificial sequence
  Synthetic oligonucleotide
cttctctacactctaact

SEQ ID NO: 1234 - DNA, 19 bp, Artificial sequence
  Synthetic oligonucleotide
ccttctctacactctaact

SEQ ID NO: 1235 - DNA, 18 bp, Artificial sequence
  Synthetic oligonucleotide
ccttctctacactctaac

SEQ ID NO: 1236 - DNA, 17 bp, Artificial sequence
  Synthetic oligonucleotide
cttctctacactctaac

SEQ ID NO: 1237 - DNA, 19 bp, Artificial sequence
  Synthetic oligonucleotide
agccttctctacactctaa

SEQ ID NO: 1238 - DNA, 17 bp, Artificial sequence
  Synthetic oligonucleotide
ccttctctacactctaa

SEQ ID NO: 1239 - DNA, 18 bp, Artificial sequence
  Synthetic oligonucleotide
gccttctctacactctaa

SEQ ID NO: 1240 - DNA, 18 bp, Artificial sequence
  Synthetic oligonucleotide
agccttctctacactcta

SEQ ID NO: 1241 - DNA, 21 bp, Artificial sequence
  Synthetic oligonucleotide
tactaactacaacacaaatca

SEQ ID NO: 1242 - DNA, 21 bp, Artificial sequence
  Synthetic oligonucleotide
ctactaactacaacacaaatc

SEQ ID NO: 1243 - DNA, 21 bp, Artificial sequence
  Synthetic oligonucleotide
cactactaactacaacacaaa

SEQ ID NO: 1244 - DNA, 20 bp, Artificial sequence
  Synthetic oligonucleotide
cactactaactacaacacaa

SEQ ID NO: 1245 - DNA, 21 bp, Artificial sequence
  Synthetic oligonucleotide
acactactaactacaacacaa

SEQ ID NO: 1246 - DNA, 19 bp, Artificial sequence
  Synthetic oligonucleotide
cactactaactacaacaca

SEQ ID NO: 1247 - DNA, 20 bp, Artificial sequence
  Synthetic oligonucleotide
acactactaactacaacaca

SEQ ID NO: 1248 - DNA, 20 bp, Artificial sequence
  Synthetic oligonucleotide
gacactactaactacaacac

SEQ ID NO: 1249 - DNA, 19 bp, Artificial sequence
  Synthetic oligonucleotide
gacactactaactacaaca

SEQ ID NO: 1250 - DNA, 18 bp, Artificial sequence
  Synthetic oligonucleotide
agacactactaactacaa

SEQ ID NO: 1251 - DNA, 17 bp, Artificial sequence
  Synthetic oligonucleotide
agacactactaactaca

SEQ ID NO: 1252 - DNA, 18 bp, Artificial sequence
  Synthetic oligonucleotide
atcatttacccccaacct

SEQ ID NO: 1253 - DNA, 17 bp, Artificial sequence
  Synthetic oligonucleotide
atcatttacccccaacc

SEQ ID NO: 1254 - DNA, 18 bp, Artificial sequence
  Synthetic oligonucleotide
caaatcatttacccccaa

SEQ ID NO: 1255 - DNA, 19 bp, Artificial sequence
  Synthetic oligonucleotide
ccaaatcatttacccccaa

SEQ ID NO: 1256 - DNA, 19 bp, Artificial sequence
  Synthetic oligonucleotide
accaaatcatttaccccca

SEQ ID NO: 1257 - DNA, 19 bp, Artificial sequence
  Synthetic oligonucleotide
taccaaatcatttaccccc

SEQ ID NO: 1258 - DNA, 17 bp, Artificial sequence
  Synthetic oligonucleotide
accaaatcatttacccc

SEQ ID NO: 1259 - DNA, 18 bp, Artificial sequence
  Synthetic oligonucleotide
taccaaatcatttacccc

SEQ ID NO: 1260 - DNA, 19 bp, Artificial sequence
  Synthetic oligonucleotide
ctaccaaatcatttacccc

SEQ ID NO: 1261 - DNA, 17 bp, Artificial sequence
  Synthetic oligonucleotide
taccaaatcatttaccc

SEQ ID NO: 1262 - DNA, 17 bp, Artificial sequence
  Synthetic oligonucleotide
ctaccaaatcatttacc

SEQ ID NO: 1263 - DNA, 19 bp, Artificial sequence
  Synthetic oligonucleotide
tgctaccaaatcatttacc

SEQ ID NO: 1264 - DNA, 18 bp, Artificial sequence
  Synthetic oligonucleotide
gctaccaaatcatttacc

SEQ ID NO: 1265 - DNA, 18 bp, Artificial sequence
  Synthetic oligonucleotide
tgctaccaaatcatttac

SEQ ID NO: 1266 - DNA, 17 bp, Artificial sequence
  Synthetic oligonucleotide
gctaccaaatcatttac

SEQ ID NO: 1267 - DNA, 17 bp, Artificial sequence
  Synthetic oligonucleotide
tgctaccaaatcattta

SEQ ID NO: 1268 - DNA, 18 bp, Artificial sequence
  Synthetic oligonucleotide
ctgctaccaaatcattta

SEQ ID NO: 1269 - DNA, 18 bp, Artificial sequence
  Synthetic oligonucleotide
actgctaccaaatcattt

SEQ ID NO: 1270 - DNA, 17 bp, Artificial sequence
  Synthetic oligonucleotide
ctgctaccaaatcattt

SEQ ID NO: 1271 - DNA, 17 bp, Artificial sequence
  Synthetic oligonucleotide
actgctaccaaatcatt

SEQ ID NO: 1272 - DNA, 17 bp, Artificial sequence
  Synthetic oligonucleotide
cactttgccataatcaa

SEQ ID NO: 1273 - DNA, 19 bp, Artificial sequence
  Synthetic oligonucleotide
ttatctcaaactatcccca

SEQ ID NO: 1274 - DNA, 17 bp, Artificial sequence
  Synthetic oligonucleotide
atctcaaactatcccca

SEQ ID NO: 1275 - DNA, 20 bp, Artificial sequence
  Synthetic oligonucleotide
cttatctcaaactatcccca

SEQ ID NO: 1276 - DNA, 17 bp, Artificial sequence
  Synthetic oligonucleotide
tatctcaaactatcccc

SEQ ID NO: 1277 - DNA, 19 bp, Artificial sequence
  Synthetic oligonucleotide
cttatctcaaactatcccc

SEQ ID NO: 1278 - DNA, 18 bp, Artificial sequence
  Synthetic oligonucleotide
ttatctcaaactatcccc

SEQ ID NO: 1279 - DNA, 18 bp, Artificial sequence
  Synthetic oligonucleotide
cttatctcaaactatccc

SEQ ID NO: 1280 - DNA, 19 bp, Artificial sequence
  Synthetic oligonucleotide
ccttatctcaaactatccc

SEQ ID NO: 1281 - DNA, 17 bp, Artificial sequence
  Synthetic oligonucleotide
ttatctcaaactatccc

SEQ ID NO: 1282 - DNA, 17 bp, Artificial sequence
  Synthetic oligonucleotide
cttatctcaaactatcc

SEQ ID NO: 1283 - DNA, 19 bp, Artificial sequence
  Synthetic oligonucleotide
cccttatctcaaactatcc

SEQ ID NO: 1284 - DNA, 18 bp, Artificial sequence
  Synthetic oligonucleotide
ccttatctcaaactatcc

SEQ ID NO: 1285 - DNA, 17 bp, Artificial sequence
  Synthetic oligonucleotide
ccttatctcaaactatc

SEQ ID NO: 1286 - DNA, 19 bp, Artificial sequence
  Synthetic oligonucleotide
gcccttatctcaaactatc

SEQ ID NO: 1287 - DNA, 18 bp, Artificial sequence
  Synthetic oligonucleotide
cccttatctcaaactatc

SEQ ID NO: 1288 - DNA, 19 bp, Artificial sequence
  Synthetic oligonucleotide
tgcccttatctcaaactat

SEQ ID NO: 1289 - DNA, 18 bp, Artificial sequence
  Synthetic oligonucleotide
gcccttatctcaaactat

SEQ ID NO: 1290 - DNA, 17 bp, Artificial sequence
  Synthetic oligonucleotide
cccttatctcaaactat

SEQ ID NO: 1291 - DNA, 17 bp, Artificial sequence
  Synthetic oligonucleotide
gcccttatctcaaacta

SEQ ID NO: 1292 - DNA, 18 bp, Artificial sequence
  Synthetic oligonucleotide
tgcccttatctcaaacta

SEQ ID NO: 1293 - DNA, 17 bp, Artificial sequence
  Synthetic oligonucleotide
tgcccttatctcaaact

SEQ ID NO: 1294 - DNA, 17 bp, Artificial sequence
  Synthetic oligonucleotide
ttgcccttatctcaaac

SEQ ID NO: 1295 - DNA, 16 bp, Artificial sequence
  Synthetic oligonucleotide
cttgcccttatctcaa

SEQ ID NO: 1296 - DNA, 18 bp, Artificial sequence
  Synthetic oligonucleotide
tgaaatcaaacttcatca

SEQ ID NO: 1297 - DNA, 16 bp, Artificial sequence
  Synthetic oligonucleotide
ggtcaccatacttaat

SEQ ID NO: 1298 - DNA, 18 bp, Artificial sequence
  Synthetic oligonucleotide
tgctaacacaaatttcct

SEQ ID NO: 1299 - DNA, 17 bp, Artificial sequence
  Synthetic oligonucleotide
gctaacacaaatttcct

SEQ ID NO: 1300 - DNA, 18 bp, Artificial sequence
  Synthetic oligonucleotide
ttgctaacacaaatttcc

SEQ ID NO: 1301 - DNA, 17 bp, Artificial sequence
  Synthetic oligonucleotide
tgctaacacaaatttcc

SEQ ID NO: 1302 - DNA, 17 bp, Artificial sequence
  Synthetic oligonucleotide
ttgctaacacaaatttc

SEQ ID NO: 1303 - DNA, 17 bp, Artificial sequence
  Synthetic oligonucleotide
cctttgctaacacaaat

SEQ ID NO: 1304 - DNA, 19 bp, Artificial sequence
  Synthetic oligonucleotide
gtataaccaataataacta

SEQ ID NO: 1305 - DNA, 18 bp, Artificial sequence
  Synthetic oligonucleotide
tctgacatcacacaattt

SEQ ID NO: 1306 - DNA, 17 bp, Artificial sequence
  Synthetic oligonucleotide
tctgacatcacacaatt

SEQ ID NO: 1307 - DNA, 17 bp, Artificial sequence
  Synthetic oligonucleotide
tatctgacatcacacaa

SEQ ID NO: 1308 - DNA, 17 bp, Artificial sequence
  Synthetic oligonucleotide
ctattccttaacccaac

SEQ ID NO: 1309 - DNA, 19 bp, Artificial sequence
  Synthetic oligonucleotide
gtctattccttaacccaac

SEQ ID NO: 1310 - DNA, 18 bp, Artificial sequence
  Synthetic oligonucleotide
gtctattccttaacccaa

SEQ ID NO: 1311 - DNA, 17 bp, Artificial sequence
  Synthetic oligonucleotide
tctattccttaacccaa

SEQ ID NO: 1312 - DNA, 17 bp, Artificial sequence
  Synthetic oligonucleotide
gtctattccttaaccca

SEQ ID NO: 1313 - DNA, 16 bp, Artificial sequence
  Synthetic oligonucleotide
gtctattccttaaccc

SEQ ID NO: 1314 - DNA, 16 bp, Artificial sequence
  Synthetic oligonucleotide
ggtctattccttaacc

SEQ ID NO: 1315 - DNA, 18 bp, Artificial sequence
  Synthetic oligonucleotide
agaacatttccttctcct

SEQ ID NO: 1316 - DNA, 17 bp, Artificial sequence
  Synthetic oligonucleotide
aactgtcccaaacaacc

SEQ ID NO: 1317 - DNA, 18 bp, Artificial sequence
  Synthetic oligonucleotide
ttagtctccctcattttc

SEQ ID NO: 1318 - DNA, 17 bp, Artificial sequence
  Synthetic oligonucleotide
atttagtctccctcatt

SEQ ID NO: 1319 - DNA, 17 bp, Artificial sequence
  Synthetic oligonucleotide
atgcatcaaatctcata

SEQ ID NO: 1320 - DNA, 21 bp, Artificial sequence
  Synthetic oligonucleotide
cctaaataatttaatcattaa

SEQ ID NO: 1321 - DNA, 21 bp, Artificial sequence
  Synthetic oligonucleotide
ccctaaataatttaatcatta

SEQ ID NO: 1322 - DNA, 21 bp, Artificial sequence
  Synthetic oligonucleotide
cccctaaataatttaatcatt

SEQ ID NO: 1323 - DNA, 20 bp, Artificial sequence
  Synthetic oligonucleotide
ccctaaataatttaatcatt

SEQ ID NO: 1324 - DNA, 19 bp, Artificial sequence
  Synthetic oligonucleotide
ccctaaataatttaatcat

SEQ ID NO: 1325 - DNA, 19 bp, Artificial sequence
  Synthetic oligonucleotide
cccctaaataatttaatca

SEQ ID NO: 1326 - DNA, 18 bp, Artificial sequence
  Synthetic oligonucleotide
ccctaaataatttaatca

SEQ ID NO: 1327 - DNA, 18 bp, Artificial sequence
  Synthetic oligonucleotide
cccctaaataatttaatc

SEQ ID NO: 1328 - DNA, 19 bp, Artificial sequence
  Synthetic oligonucleotide
tcccctaaataatttaatc

SEQ ID NO: 1329 - DNA, 18 bp, Artificial sequence
  Synthetic oligonucleotide
ttgctaatatttccaaaa

SEQ ID NO: 1330 - DNA, 17 bp, Artificial sequence
  Synthetic oligonucleotide
cttgctaatatttccaa

SEQ ID NO: 1331 - DNA, 18 bp, Artificial sequence
  Synthetic oligonucleotide
actgtcatccatatttcc

SEQ ID NO: 1332 - DNA, 17 bp, Artificial sequence
  Synthetic oligonucleotide
actgtcatccatatttc

SEQ ID NO: 1333 - DNA, 18 bp, Artificial sequence
  Synthetic oligonucleotide
aatgccccactctaatat

SEQ ID NO: 1334 - DNA, 16 bp, Artificial sequence
  Synthetic oligonucleotide
tgccccactctaatat

SEQ ID NO: 1335 - DNA, 17 bp, Artificial sequence
  Synthetic oligonucleotide
atgccccactctaatat

SEQ ID NO: 1336 - DNA, 18 bp, Artificial sequence
  Synthetic oligonucleotide
aaatgccccactctaata

SEQ ID NO: 1337 - DNA, 16 bp, Artificial sequence
  Synthetic oligonucleotide
atgccccactctaata

SEQ ID NO: 1338 - DNA, 17 bp, Artificial sequence
  Synthetic oligonucleotide
aatgccccactctaata

SEQ ID NO: 1339 - DNA, 17 bp, Artificial sequence
  Synthetic oligonucleotide
ttaaatgccccactcta

SEQ ID NO: 1340 - DNA, 18 bp, Artificial sequence
  Synthetic oligonucleotide
tctgaaaattcactatct

SEQ ID NO: 1341 - DNA, 17 bp, Artificial sequence
  Synthetic oligonucleotide
gtctactatatacatct

SEQ ID NO: 1342 - DNA, 18 bp, Artificial sequence
  Synthetic oligonucleotide
agtctactatatacatct

SEQ ID NO: 1343 - DNA, 17 bp, Artificial sequence
  Synthetic oligonucleotide
agtctactatatacatc

SEQ ID NO: 1344 - DNA, 16 bp, Artificial sequence
  Synthetic oligonucleotide
gtctactatatacatc

SEQ ID NO: 1345 - DNA, 18 bp, Artificial sequence
  Synthetic oligonucleotide
tagtctactatatacatc

SEQ ID NO: 1346 - DNA, 17 bp, Artificial sequence
  Synthetic oligonucleotide
tagtctactatatacat

SEQ ID NO: 1347 - DNA, 18 bp, Artificial sequence
  Synthetic oligonucleotide
ctagtctactatatacat

SEQ ID NO: 1348 - DNA, 17 bp, Artificial sequence
  Synthetic oligonucleotide
ctagtctactatataca

SEQ ID NO: 1349 - DNA, 17 bp, Artificial sequence
  Synthetic oligonucleotide
actagtctactatatac

SEQ ID NO: 1350 - DNA, 16 bp, Artificial sequence
  Synthetic oligonucleotide
ctagtctactatatac

SEQ ID NO: 1351 - DNA, 17 bp, Artificial sequence
  Synthetic oligonucleotide
gtatattctacccataa

SEQ ID NO: 1352 - DNA, 18 bp, Artificial sequence
  Synthetic oligonucleotide
tgtatattctacccataa

SEQ ID NO: 1353 - DNA, 17 bp, Artificial sequence
  Synthetic oligonucleotide
tgtatattctacccata

SEQ ID NO: 1354 - DNA, 18 bp, Artificial sequence
  Synthetic oligonucleotide
atgtatattctacccata

SEQ ID NO: 1355 - DNA, 17 bp, Artificial sequence
  Synthetic oligonucleotide
atgtatattctacccat

SEQ ID NO: 1356 - DNA, 19 bp, Artificial sequence
  Synthetic oligonucleotide
gaaaaccacacaattccta

SEQ ID NO: 1357 - DNA, 18 bp, Artificial sequence
  Synthetic oligonucleotide
gaaaaccacacaattcct

SEQ ID NO: 1358 - DNA, 19 bp, Artificial sequence
  Synthetic oligonucleotide
agaaaaccacacaattcct

SEQ ID NO: 1359 - DNA, 19 bp, Artificial sequence
  Synthetic oligonucleotide
cagaaaaccacacaattcc

SEQ ID NO: 1360 - DNA, 18 bp, Artificial sequence
  Synthetic oligonucleotide
agaaaaccacacaattcc

SEQ ID NO: 1361 - DNA, 19 bp, Artificial sequence
  Synthetic oligonucleotide
ccagaaaaccacacaattc

SEQ ID NO: 1362 - DNA, 18 bp, Artificial sequence
  Synthetic oligonucleotide
ccagaaaaccacacaatt

SEQ ID NO: 1363 - DNA, 18 bp, Artificial sequence
  Synthetic oligonucleotide
tccagaaaaccacacaat

SEQ ID NO: 1364 - DNA, 18 bp, Artificial sequence
  Synthetic oligonucleotide
ttccagaaaaccacacaa

SEQ ID NO: 1365 - DNA, 19 bp, Artificial sequence
  Synthetic oligonucleotide
gatatatcactaaatccat

SEQ ID NO: 1366 - DNA, 18 bp, Artificial sequence
  Synthetic oligonucleotide
gatatatcactaaatcca

SEQ ID NO: 1367 - DNA, 19 bp, Artificial sequence
  Synthetic oligonucleotide
agatatatcactaaatcca

SEQ ID NO: 1368 - DNA, 18 bp, Artificial sequence
  Synthetic oligonucleotide
agatatatcactaaatcc

SEQ ID NO: 1369 - DNA, 19 bp, Artificial sequence
  Synthetic oligonucleotide
tcatatataaatttctcta

SEQ ID NO: 1370 - DNA, 18 bp, Artificial sequence
  Synthetic oligonucleotide
tcatatataaatttctct

SEQ ID NO: 1371 - DNA, 17 bp, Artificial sequence
  Synthetic oligonucleotide
aagatcacacaaccata

SEQ ID NO: 1372 - DNA, 18 bp, Artificial sequence
  Synthetic oligonucleotide
taaaagatcacacaacca

SEQ ID NO: 1373 - DNA, 20 bp, Artificial sequence
  Synthetic oligonucleotide
catcacataaaaacccactt

SEQ ID NO: 1374 - DNA, 19 bp, Artificial sequence
  Synthetic oligonucleotide
catcacataaaaacccact

SEQ ID NO: 1375 - DNA, 20 bp, Artificial sequence
  Synthetic oligonucleotide
tcatcacataaaaacccact

SEQ ID NO: 1376 - DNA, 18 bp, Artificial sequence
  Synthetic oligonucleotide
catcacataaaaacccac

SEQ ID NO: 1377 - DNA, 19 bp, Artificial sequence
  Synthetic oligonucleotide
tcatcacataaaaacccac

SEQ ID NO: 1378 - DNA, 20 bp, Artificial sequence
  Synthetic oligonucleotide
gtcatcacataaaaacccac

SEQ ID NO: 1379 - DNA, 19 bp, Artificial sequence
  Synthetic oligonucleotide
gtcatcacataaaaaccca

SEQ ID NO: 1380 - DNA, 18 bp, Artificial sequence
  Synthetic oligonucleotide
tcatcacataaaaaccca

SEQ ID NO: 1381 - DNA, 17 bp, Artificial sequence
  Synthetic oligonucleotide
catcacataaaaaccca

SEQ ID NO: 1382 - DNA, 17 bp, Artificial sequence
  Synthetic oligonucleotide
tcatcacataaaaaccc

SEQ ID NO: 1383 - DNA, 18 bp, Artificial sequence
  Synthetic oligonucleotide
gtcatcacataaaaaccc

SEQ ID NO: 1384 - DNA, 19 bp, Artificial sequence
  Synthetic oligonucleotide
agtcatcacataaaaaccc

SEQ ID NO: 1385 - DNA, 19 bp, Artificial sequence
  Synthetic oligonucleotide
tagtcatcacataaaaacc

SEQ ID NO: 1386 - DNA, 18 bp, Artificial sequence
  Synthetic oligonucleotide
agtcatcacataaaaacc

SEQ ID NO: 1387 - DNA, 17 bp, Artificial sequence
  Synthetic oligonucleotide
atgctaaatacaaatct

SEQ ID NO: 1388 - DNA, 20 bp, Artificial sequence
  Synthetic oligonucleotide
gaaaccattactacaaccaa

SEQ ID NO: 1389 - DNA, 19 bp, Artificial sequence
  Synthetic oligonucleotide
gaaaccattactacaacca

SEQ ID NO: 1390 - DNA, 19 bp, Artificial sequence
  Synthetic oligonucleotide
atgaaaccattactacaac

SEQ ID NO: 1391 - DNA, 18 bp, Artificial sequence
  Synthetic oligonucleotide
catgaaaccattactaca

SEQ ID NO: 1392 - DNA, 18 bp, Artificial sequence
  Synthetic oligonucleotide
ccatgaaaccattactac

SEQ ID NO: 1393 - DNA, 17 bp, Artificial sequence
  Synthetic oligonucleotide
ctcccatgaaaccatta

SEQ ID NO: 1394 - DNA, 18 bp, Artificial sequence
  Synthetic oligonucleotide
tgcttactttatacaaaa

SEQ ID NO: 1395 - DNA, 18 bp, Artificial sequence
  Synthetic oligonucleotide
atgttaatactttttcca

SEQ ID NO: 1396 - DNA, 17 bp, Artificial sequence
  Synthetic oligonucleotide
cctaatttaacccacaa

SEQ ID NO: 1397 - DNA, 19 bp, Artificial sequence
  Synthetic oligonucleotide
atcctaatttaacccacaa

SEQ ID NO: 1398 - DNA, 18 bp, Artificial sequence
  Synthetic oligonucleotide
tcctaatttaacccacaa

SEQ ID NO: 1399 - DNA, 21 bp, Artificial sequence
  Synthetic oligonucleotide
taatcctaatttaacccacaa

SEQ ID NO: 1400 - DNA, 20 bp, Artificial sequence
  Synthetic oligonucleotide
taatcctaatttaacccaca

SEQ ID NO: 1401 - DNA, 19 bp, Artificial sequence
  Synthetic oligonucleotide
aatcctaatttaacccaca

SEQ ID NO: 1402 - DNA, 17 bp, Artificial sequence
  Synthetic oligonucleotide
tcctaatttaacccaca

SEQ ID NO: 1403 - DNA, 19 bp, Artificial sequence
  Synthetic oligonucleotide
taatcctaatttaacccac

SEQ ID NO: 1404 - DNA, 17 bp, Artificial sequence
  Synthetic oligonucleotide
atcctaatttaacccac

SEQ ID NO: 1405 - DNA, 18 bp, Artificial sequence
  Synthetic oligonucleotide
aatcctaatttaacccac

SEQ ID NO: 1406 - DNA, 18 bp, Artificial sequence
  Synthetic oligonucleotide
taatcctaatttaaccca

SEQ ID NO: 1407 - DNA, 17 bp, Artificial sequence
  Synthetic oligonucleotide
aatcctaatttaaccca

SEQ ID NO: 1408 - DNA, 19 bp, Artificial sequence
  Synthetic oligonucleotide
gtaatcctaatttaaccca

SEQ ID NO: 1409 - DNA, 17 bp, Artificial sequence
  Synthetic oligonucleotide
taatcctaatttaaccc

SEQ ID NO: 1410 - DNA, 18 bp, Artificial sequence
  Synthetic oligonucleotide
gtaatcctaatttaaccc

SEQ ID NO: 1411 - DNA, 19 bp, Artificial sequence
  Synthetic oligonucleotide
agtaatcctaatttaaccc

SEQ ID NO: 1412 - DNA, 18 bp, Artificial sequence
  Synthetic oligonucleotide
agtaatcctaatttaacc

SEQ ID NO: 1413 - DNA, 18 bp, Artificial sequence
  Synthetic oligonucleotide
tcatttatcactaccaca

SEQ ID NO: 1414 - DNA, 20 bp, Artificial sequence
  Synthetic oligonucleotide
catcatttatcactaccaca

SEQ ID NO: 1415 - DNA, 17 bp, Artificial sequence
  Synthetic oligonucleotide
catttatcactaccaca

SEQ ID NO: 1416 - DNA, 19 bp, Artificial sequence
  Synthetic oligonucleotide
atcatttatcactaccaca

SEQ ID NO: 1417 - DNA, 21 bp, Artificial sequence
  Synthetic oligonucleotide
acatcatttatcactaccaca

SEQ ID NO: 1418 - DNA, 17 bp, Artificial sequence
  Synthetic oligonucleotide
tcatttatcactaccac

SEQ ID NO: 1419 - DNA, 18 bp, Artificial sequence
  Synthetic oligonucleotide
atcatttatcactaccac

SEQ ID NO: 1420 - DNA, 19 bp, Artificial sequence
  Synthetic oligonucleotide
catcatttatcactaccac

SEQ ID NO: 1421 - DNA, 21 bp, Artificial sequence
  Synthetic oligonucleotide
aacatcatttatcactaccac

SEQ ID NO: 1422 - DNA, 20 bp, Artificial sequence
  Synthetic oligonucleotide
aacatcatttatcactacca

SEQ ID NO: 1423 - DNA, 18 bp, Artificial sequence
  Synthetic oligonucleotide
catcatttatcactacca

SEQ ID NO: 1424 - DNA, 21 bp, Artificial sequence
  Synthetic oligonucleotide
taacatcatttatcactacca

SEQ ID NO: 1425 - DNA, 19 bp, Artificial sequence
  Synthetic oligonucleotide
acatcatttatcactacca

SEQ ID NO: 1426 - DNA, 20 bp, Artificial sequence
  Synthetic oligonucleotide
taacatcatttatcactacc

SEQ ID NO: 1427 - DNA, 18 bp, Artificial sequence
  Synthetic oligonucleotide
acatcatttatcactacc

SEQ ID NO: 1428 - DNA, 21 bp, Artificial sequence
  Synthetic oligonucleotide
ttaacatcatttatcactacc

SEQ ID NO: 1429 - DNA, 19 bp, Artificial sequence
  Synthetic oligonucleotide
aacatcatttatcactacc

SEQ ID NO: 1430 - DNA, 20 bp, Artificial sequence
  Synthetic oligonucleotide
ttaacatcatttatcactac

SEQ ID NO: 1431 - DNA, 19 bp, Artificial sequence
  Synthetic oligonucleotide
taacatcatttatcactac

SEQ ID NO: 1432 - DNA, 21 bp, Artificial sequence
  Synthetic oligonucleotide
attaacatcatttatcactac

SEQ ID NO: 1433 - DNA, 20 bp, Artificial sequence
  Synthetic oligonucleotide
attaacatcatttatcacta

SEQ ID NO: 1434 - DNA, 19 bp, Artificial sequence
  Synthetic oligonucleotide
ttaacatcatttatcacta

SEQ ID NO: 1435 - DNA, 21 bp, Artificial sequence
  Synthetic oligonucleotide
taattaacatcatttatcact

SEQ ID NO: 1436 - DNA, 21 bp, Artificial sequence
  Synthetic oligonucleotide
ctaattaacatcatttatcac

SEQ ID NO: 1437 - DNA, 21 bp, Artificial sequence
  Synthetic oligonucleotide
cctaattaacatcatttatca

SEQ ID NO: 1438 - DNA, 20 bp, Artificial sequence
  Synthetic oligonucleotide
ctaattaacatcatttatca

SEQ ID NO: 1439 - DNA, 20 bp, Artificial sequence
  Synthetic oligonucleotide
cctaattaacatcatttatc

SEQ ID NO: 1440 - DNA, 21 bp, Artificial sequence
  Synthetic oligonucleotide
ccctaattaacatcatttatc

SEQ ID NO: 1441 - DNA, 19 bp, Artificial sequence
  Synthetic oligonucleotide
cctaattaacatcatttat

SEQ ID NO: 1442 - DNA, 18 bp, Artificial sequence
  Synthetic oligonucleotide
cctaattaacatcattta

SEQ ID NO: 1443 - DNA, 19 bp, Artificial sequence
  Synthetic oligonucleotide
ccctaattaacatcattta

SEQ ID NO: 1444 - DNA, 19 bp, Artificial sequence
  Synthetic oligonucleotide
gccctaattaacatcattt

SEQ ID NO: 1445 - DNA, 18 bp, Artificial sequence
  Synthetic oligonucleotide
ccctaattaacatcattt

SEQ ID NO: 1446 - DNA, 16 bp, Artificial sequence
  Synthetic oligonucleotide
cggccctaattaacat

SEQ ID NO: 1447 - DNA, 15 bp, Artificial sequence
  Synthetic oligonucleotide
ctcggccctaattaa

SEQ ID NO: 1448 - DNA, 21 bp, Artificial sequence
  Synthetic oligonucleotide
cacatataacatataaacaca

SEQ ID NO: 1449 - DNA, 21 bp, Artificial sequence
  Synthetic oligonucleotide
tcacatataacatataaacac

SEQ ID NO: 1450 - DNA, 20 bp, Artificial sequence
  Synthetic oligonucleotide
actatcacatataacatata

SEQ ID NO: 1451 - DNA, 21 bp, Artificial sequence
  Synthetic oligonucleotide
cactatcacatataacatata

SEQ ID NO: 1452 - DNA, 20 bp, Artificial sequence
  Synthetic oligonucleotide
cactatcacatataacatat

SEQ ID NO: 1453 - DNA, 19 bp, Artificial sequence
  Synthetic oligonucleotide
cactatcacatataacata

SEQ ID NO: 1454 - DNA, 18 bp, Artificial sequence
  Synthetic oligonucleotide
cactatcacatataacat

SEQ ID NO: 1455 - DNA, 17 bp, Artificial sequence
  Synthetic oligonucleotide
cactatcacatataaca

SEQ ID NO: 1456 - DNA, 17 bp, Artificial sequence
  Synthetic oligonucleotide
caaagttttcccattac

SEQ ID NO: 1457 - DNA, 17 bp, Artificial sequence
  Synthetic oligonucleotide
acaaagttttcccatta

SEQ ID NO: 1458 - DNA, 17 bp, Artificial sequence
  Synthetic oligonucleotide
tcagtccaacataactc

SEQ ID NO: 1459 - DNA, 16 bp, Artificial sequence
  Synthetic oligonucleotide
cagtccaacataactc

SEQ ID NO: 1460 - DNA, 18 bp, Artificial sequence
  Synthetic oligonucleotide
atcagtccaacataactc

SEQ ID NO: 1461 - DNA, 17 bp, Artificial sequence
  Synthetic oligonucleotide
atcagtccaacataact

SEQ ID NO: 1462 - DNA, 21 bp, Artificial sequence
  Synthetic oligonucleotide
taaacattaaaccctcccaaa

SEQ ID NO: 1463 - DNA, 18 bp, Artificial sequence
  Synthetic oligonucleotide
aacattaaaccctcccaa

SEQ ID NO: 1464 - DNA, 20 bp, Artificial sequence
  Synthetic oligonucleotide
taaacattaaaccctcccaa

SEQ ID NO: 1465 - DNA, 19 bp, Artificial sequence
  Synthetic oligonucleotide
aaacattaaaccctcccaa

SEQ ID NO: 1466 - DNA, 21 bp, Artificial sequence
  Synthetic oligonucleotide
tataaacattaaaccctccca

SEQ ID NO: 1467 - DNA, 16 bp, Artificial sequence
  Synthetic oligonucleotide
aacattaaaccctccc

SEQ ID NO: 1468 - DNA, 17 bp, Artificial sequence
  Synthetic oligonucleotide
aaacattaaaccctccc

SEQ ID NO: 1469 - DNA, 18 bp, Artificial sequence
  Synthetic oligonucleotide
taaacattaaaccctccc

SEQ ID NO: 1470 - DNA, 19 bp, Artificial sequence
  Synthetic oligonucleotide
ataaacattaaaccctccc

SEQ ID NO: 1471 - DNA, 19 bp, Artificial sequence
  Synthetic oligonucleotide
tataaacattaaaccctcc

SEQ ID NO: 1472 - DNA, 17 bp, Artificial sequence
  Synthetic oligonucleotide
taaacattaaaccctcc

SEQ ID NO: 1473 - DNA, 21 bp, Artificial sequence
  Synthetic oligonucleotide
actataaacattaaaccctcc

SEQ ID NO: 1474 - DNA, 18 bp, Artificial sequence
  Synthetic oligonucleotide
ataaacattaaaccctcc

SEQ ID NO: 1475 - DNA, 21 bp, Artificial sequence
  Synthetic oligonucleotide
aactataaacattaaaccctc

SEQ ID NO: 1476 - DNA, 19 bp, Artificial sequence
  Synthetic oligonucleotide
ctataaacattaaaccctc

SEQ ID NO: 1477 - DNA, 20 bp, Artificial sequence
  Synthetic oligonucleotide
actataaacattaaaccctc

SEQ ID NO: 1478 - DNA, 21 bp, Artificial sequence
  Synthetic oligonucleotide
aaactataaacattaaaccct

SEQ ID NO: 1479 - DNA, 18 bp, Artificial sequence
  Synthetic oligonucleotide
ctataaacattaaaccct

SEQ ID NO: 1480 - DNA, 19 bp, Artificial sequence
  Synthetic oligonucleotide
actataaacattaaaccct

SEQ ID NO: 1481 - DNA, 20 bp, Artificial sequence
  Synthetic oligonucleotide
aactataaacattaaaccct

SEQ ID NO: 1482 - DNA, 19 bp, Artificial sequence
  Synthetic oligonucleotide
gctttaaactataaacatt

SEQ ID NO: 1483 - DNA, 18 bp, Artificial sequence
  Synthetic oligonucleotide
tgctttaaactataaaca

SEQ ID NO: 1484 - DNA, 17 bp, Artificial sequence
  Synthetic oligonucleotide
cagatttatcactatta

SEQ ID NO: 1485 - DNA, 17 bp, Artificial sequence
  Synthetic oligonucleotide
tcacagcctatcaccac

SEQ ID NO: 1486 - DNA, 17 bp, Artificial sequence
  Synthetic oligonucleotide
atcacagcctatcacca

SEQ ID NO: 1487 - DNA, 17 bp, Artificial sequence
  Synthetic oligonucleotide
aatcacagcctatcacc

SEQ ID NO: 1488 - DNA, 16 bp, Artificial sequence
  Synthetic oligonucleotide
atcacagcctatcacc

SEQ ID NO: 1489 - DNA, 16 bp, Artificial sequence
  Synthetic oligonucleotide
gcgtcacccaaatcac

SEQ ID NO: 1490 - DNA, 16 bp, Artificial sequence
  Synthetic oligonucleotide
agcgtcacccaaatca

SEQ ID NO: 1491 - DNA, 15 bp, Artificial sequence
  Synthetic oligonucleotide
agcgtcacccaaatc

SEQ ID NO: 1492 - DNA, 17 bp, Artificial sequence
  Synthetic oligonucleotide
cagatcctaaaatcact

SEQ ID NO: 1493 - DNA, 17 bp, Artificial sequence
  Synthetic oligonucleotide
tcagatcctaaaatcac

SEQ ID NO: 1494 - DNA, 18 bp, Artificial sequence
  Synthetic oligonucleotide
agtaaaaccaatcatcat

SEQ ID NO: 1495 - DNA, 17 bp, Artificial sequence
  Synthetic oligonucleotide
agtaaaaccaatcatca

SEQ ID NO: 1496 - DNA, 20 bp, Artificial sequence
  Synthetic oligonucleotide
cccttccatctctactaaaa

SEQ ID NO: 1497 - DNA, 20 bp, Artificial sequence
  Synthetic oligonucleotide
ataactacataacaaaccca

SEQ ID NO: 1498 - DNA, 21 bp, Artificial sequence
  Synthetic oligonucleotide
aataactacataacaaaccca

SEQ ID NO: 1499 - DNA, 18 bp, Artificial sequence
  Synthetic oligonucleotide
aactacataacaaaccca

SEQ ID NO: 1500 - DNA, 19 bp, Artificial sequence
  Synthetic oligonucleotide
taactacataacaaaccca

SEQ ID NO: 1501 - DNA, 17 bp, Artificial sequence
  Synthetic oligonucleotide
actacataacaaaccca

SEQ ID NO: 1502 - DNA, 21 bp, Artificial sequence
  Synthetic oligonucleotide
caataactacataacaaaccc

SEQ ID NO: 1503 - DNA, 19 bp, Artificial sequence
  Synthetic oligonucleotide
ataactacataacaaaccc

SEQ ID NO: 1504 - DNA, 21 bp, Artificial sequence
  Synthetic oligonucleotide
acaataactacataacaaacc

SEQ ID NO: 1505 - DNA, 19 bp, Artificial sequence
  Synthetic oligonucleotide
tgaattcacaataactaca

SEQ ID NO: 1506 - DNA, 18 bp, Artificial sequence
  Synthetic oligonucleotide
gcacatttttcttaaact

SEQ ID NO: 1507 - DNA, 19 bp, Artificial sequence
  Synthetic oligonucleotide
gctatacctaaaacaatct

SEQ ID NO: 1508 - DNA, 18 bp, Artificial sequence
  Synthetic oligonucleotide
gctatacctaaaacaatc

SEQ ID NO: 1509 - DNA, 17 bp, Artificial sequence
  Synthetic oligonucleotide
cccttgtaactaaaaat

SEQ ID NO: 1510 - DNA, 17 bp, Artificial sequence
  Synthetic oligonucleotide
ccccttgtaactaaaaa

SEQ ID NO: 1511 - DNA, 16 bp, Artificial sequence
  Synthetic oligonucleotide
ccccttgtaactaaaa

SEQ ID NO: 1512 - DNA, 16 bp, Artificial sequence
  Synthetic oligonucleotide
accccttgtaactaaa

SEQ ID NO: 1513 - DNA, 16 bp, Artificial sequence
  Synthetic oligonucleotide
caccccttgtaactaa

SEQ ID NO: 1514 - DNA, 16 bp, Artificial sequence
  Synthetic oligonucleotide
acaccccttgtaacta

SEQ ID NO: 1515 - DNA, 17 bp, Artificial sequence
  Synthetic oligonucleotide
gctaaaactaatcatct

SEQ ID NO: 1516 - DNA, 16 bp, Artificial sequence
  Synthetic oligonucleotide
ggctaaaactaatcat

SEQ ID NO: 1517 - DNA, 21 bp, Artificial sequence
  Synthetic oligonucleotide
ttacccttcatatatacatct

SEQ ID NO: 1518 - DNA, 21 bp, Artificial sequence
  Synthetic oligonucleotide
attacccttcatatatacatc

SEQ ID NO: 1519 - DNA, 20 bp, Artificial sequence
  Synthetic oligonucleotide
ttacccttcatatatacatc

SEQ ID NO: 1520 - DNA, 21 bp, Artificial sequence
  Synthetic oligonucleotide
cattacccttcatatatacat

SEQ ID NO: 1521 - DNA, 19 bp, Artificial sequence
  Synthetic oligonucleotide
ttacccttcatatatacat

SEQ ID NO: 1522 - DNA, 20 bp, Artificial sequence
  Synthetic oligonucleotide
attacccttcatatatacat

SEQ ID NO: 1523 - DNA, 21 bp, Artificial sequence
  Synthetic oligonucleotide
acattacccttcatatataca

SEQ ID NO: 1524 - DNA, 18 bp, Artificial sequence
  Synthetic oligonucleotide
ttacccttcatatataca

SEQ ID NO: 1525 - DNA, 20 bp, Artificial sequence
  Synthetic oligonucleotide
cattacccttcatatataca

SEQ ID NO: 1526 - DNA, 19 bp, Artificial sequence
  Synthetic oligonucleotide
attacccttcatatataca

SEQ ID NO: 1527 - DNA, 18 bp, Artificial sequence
  Synthetic oligonucleotide
attacccttcatatatac

SEQ ID NO: 1528 - DNA, 17 bp, Artificial sequence
  Synthetic oligonucleotide
ttacccttcatatatac

SEQ ID NO: 1529 - DNA, 19 bp, Artificial sequence
  Synthetic oligonucleotide
cattacccttcatatatac

SEQ ID NO: 1530 - DNA, 20 bp, Artificial sequence
  Synthetic oligonucleotide
acattacccttcatatatac

SEQ ID NO: 1531 - DNA, 21 bp, Artificial sequence
  Synthetic oligonucleotide
tacattacccttcatatatac

SEQ ID NO: 1532 - DNA, 18 bp, Artificial sequence
  Synthetic oligonucleotide
cattacccttcatatata

SEQ ID NO: 1533 - DNA, 20 bp, Artificial sequence
  Synthetic oligonucleotide
tacattacccttcatatata

SEQ ID NO: 1534 - DNA, 17 bp, Artificial sequence
  Synthetic oligonucleotide
attacccttcatatata

SEQ ID NO: 1535 - DNA, 19 bp, Artificial sequence
  Synthetic oligonucleotide
acattacccttcatatata

SEQ ID NO: 1536 - DNA, 17 bp, Artificial sequence
  Synthetic oligonucleotide
cattacccttcatatat

SEQ ID NO: 1537 - DNA, 18 bp, Artificial sequence
  Synthetic oligonucleotide
acattacccttcatatat

SEQ ID NO: 1538 - DNA, 19 bp, Artificial sequence
  Synthetic oligonucleotide
tacattacccttcatatat

SEQ ID NO: 1539 - DNA, 17 bp, Artificial sequence
  Synthetic oligonucleotide
acattacccttcatata

SEQ ID NO: 1540 - DNA, 18 bp, Artificial sequence
  Synthetic oligonucleotide
tacattacccttcatata

SEQ ID NO: 1541 - DNA, 17 bp, Artificial sequence
  Synthetic oligonucleotide
tacattacccttcatat

SEQ ID NO: 1542 - DNA, 17 bp, Artificial sequence
  Synthetic oligonucleotide
gattcttatacttacta

SEQ ID NO: 1543 - DNA, 17 bp, Artificial sequence
  Synthetic oligonucleotide
tgattcttatacttact

SEQ ID NO: 1544 - DNA, 18 bp, Artificial sequence
  Synthetic oligonucleotide
atgattcttatacttact

SEQ ID NO: 1545 - DNA, 17 bp, Artificial sequence
  Synthetic oligonucleotide
gcctcatttttaccttt

SEQ ID NO: 1546 - DNA, 17 bp, Artificial sequence
  Synthetic oligonucleotide
accaatcttctatttta

SEQ ID NO: 1547 - DNA, 19 bp, Artificial sequence
  Synthetic oligonucleotide
caaccaatcttctatttta

SEQ ID NO: 1548 - DNA, 19 bp, Artificial sequence
  Synthetic oligonucleotide
gcaaccaatcttctatttt

SEQ ID NO: 1549 - DNA, 18 bp, Artificial sequence
  Synthetic oligonucleotide
gcaaccaatcttctattt

SEQ ID NO: 1550 - DNA, 17 bp, Artificial sequence
  Synthetic oligonucleotide
gcaaccaatcttctatt

SEQ ID NO: 1551 - DNA, 18 bp, Artificial sequence
  Synthetic oligonucleotide
tgcaaccaatcttctatt

SEQ ID NO: 1552 - DNA, 17 bp, Artificial sequence
  Synthetic oligonucleotide
taactgcaaccaatctt

SEQ ID NO: 1553 - DNA, 18 bp, Artificial sequence
  Synthetic oligonucleotide
tgaatacaacacacatca

SEQ ID NO: 1554 - DNA, 19 bp, Artificial sequence
  Synthetic oligonucleotide
atgaatacaacacacatca

SEQ ID NO: 1555 - DNA, 19 bp, Artificial sequence
  Synthetic oligonucleotide
taaaaatataactactcct

SEQ ID NO: 1556 - DNA, 19 bp, Artificial sequence
  Synthetic oligonucleotide
gtaaaaatataactactcc

SEQ ID NO: 1557 - DNA, 17 bp, Artificial sequence
  Synthetic oligonucleotide
tcaactgatacccacaa

SEQ ID NO: 1558 - DNA, 18 bp, Artificial sequence
  Synthetic oligonucleotide
tgtcttaacatttttctt

SEQ ID NO: 1559 - DNA, 21 bp, Artificial sequence
  Synthetic oligonucleotide
ccacttcaaacttttaattaa

SEQ ID NO: 1560 - DNA, 20 bp, Artificial sequence
  Synthetic oligonucleotide
ccacttcaaacttttaatta

SEQ ID NO: 1561 - DNA, 21 bp, Artificial sequence
  Synthetic oligonucleotide
cccacttcaaacttttaatta

SEQ ID NO: 1562 - DNA, 19 bp, Artificial sequence
  Synthetic oligonucleotide
ccacttcaaacttttaatt

SEQ ID NO: 1563 - DNA, 20 bp, Artificial sequence
  Synthetic oligonucleotide
cccacttcaaacttttaatt

SEQ ID NO: 1564 - DNA, 21 bp, Artificial sequence
  Synthetic oligonucleotide
acccacttcaaacttttaatt

SEQ ID NO: 1565 - DNA, 18 bp, Artificial sequence
  Synthetic oligonucleotide
ccacttcaaacttttaat

SEQ ID NO: 1566 - DNA, 20 bp, Artificial sequence
  Synthetic oligonucleotide
acccacttcaaacttttaat

SEQ ID NO: 1567 - DNA, 21 bp, Artificial sequence
  Synthetic oligonucleotide
aacccacttcaaacttttaat

SEQ ID NO: 1568 - DNA, 18 bp, Artificial sequence
  Synthetic oligonucleotide
cccacttcaaacttttaa

SEQ ID NO: 1569 - DNA, 19 bp, Artificial sequence
  Synthetic oligonucleotide
acccacttcaaacttttaa

SEQ ID NO: 1570 - DNA, 17 bp, Artificial sequence
  Synthetic oligonucleotide
cccacttcaaactttta

SEQ ID NO: 1571 - DNA, 18 bp, Artificial sequence
  Synthetic oligonucleotide
acccacttcaaactttta

SEQ ID NO: 1572 - DNA, 19 bp, Artificial sequence
  Synthetic oligonucleotide
aacccacttcaaactttta

SEQ ID NO: 1573 - DNA, 17 bp, Artificial sequence
  Synthetic oligonucleotide
acccacttcaaactttt

SEQ ID NO: 1574 - DNA, 18 bp, Artificial sequence
  Synthetic oligonucleotide
aacccacttcaaactttt

SEQ ID NO: 1575 - DNA, 17 bp, Artificial sequence
  Synthetic oligonucleotide
aacccacttcaaacttt

SEQ ID NO: 1576 - DNA, 16 bp, Artificial sequence
  Synthetic oligonucleotide
ggactctattaatcaa

SEQ ID NO: 1577 - DNA, 17 bp, Artificial sequence
  Synthetic oligonucleotide
gaatattctactcttct

SEQ ID NO: 1578 - DNA, 18 bp, Artificial sequence
  Synthetic oligonucleotide
ctgtatttaccaattcaa

SEQ ID NO: 1579 - DNA, 17 bp, Artificial sequence
  Synthetic oligonucleotide
ctgtatttaccaattca

SEQ ID NO: 1580 - DNA, 18 bp, Artificial sequence
  Synthetic oligonucleotide
actgtatttaccaattca

SEQ ID NO: 1581 - DNA, 17 bp, Artificial sequence
  Synthetic oligonucleotide
actgtatttaccaattc

SEQ ID NO: 1582 - DNA, 17 bp, Artificial sequence
  Synthetic oligonucleotide
cactgtatttaccaatt

SEQ ID NO: 1583 - DNA, 17 bp, Artificial sequence
  Synthetic oligonucleotide
tcactgtatttaccaat

SEQ ID NO: 1584 - DNA, 21 bp, Artificial sequence
  Synthetic oligonucleotide
ccaactactttacttttcaaa

SEQ ID NO: 1585 - DNA, 20 bp, Artificial sequence
  Synthetic oligonucleotide
ccaactactttacttttcaa

SEQ ID NO: 1586 - DNA, 21 bp, Artificial sequence
  Synthetic oligonucleotide
accaactactttacttttcaa

SEQ ID NO: 1587 - DNA, 19 bp, Artificial sequence
  Synthetic oligonucleotide
ccaactactttacttttca

SEQ ID NO: 1588 - DNA, 21 bp, Artificial sequence
  Synthetic oligonucleotide
taccaactactttacttttca

SEQ ID NO: 1589 - DNA, 20 bp, Artificial sequence
  Synthetic oligonucleotide
accaactactttacttttca

SEQ ID NO: 1590 - DNA, 20 bp, Artificial sequence
  Synthetic oligonucleotide
taccaactactttacttttc

SEQ ID NO: 1591 - DNA, 19 bp, Artificial sequence
  Synthetic oligonucleotide
gtaccaactactttacttt

SEQ ID NO: 1592 - DNA, 18 bp, Artificial sequence
  Synthetic oligonucleotide
gtaccaactactttactt

SEQ ID NO: 1593 - DNA, 17 bp, Artificial sequence
  Synthetic oligonucleotide
gtaccaactactttact

SEQ ID NO: 1594 - DNA, 18 bp, Artificial sequence
  Synthetic oligonucleotide
tgtaccaactactttact

SEQ ID NO: 1595 - DNA, 18 bp, Artificial sequence
  Synthetic oligonucleotide
ttgtaccaactactttac

SEQ ID NO: 1596 - DNA, 16 bp, Artificial sequence
  Synthetic oligonucleotide
gtaccaactactttac

SEQ ID NO: 1597 - DNA, 17 bp, Artificial sequence
  Synthetic oligonucleotide
tgtaccaactactttac

SEQ ID NO: 1598 - DNA, 17 bp, Artificial sequence
  Synthetic oligonucleotide
ttgtaccaactacttta

SEQ ID NO: 1599 - DNA, 20 bp, Artificial sequence
  Synthetic oligonucleotide
atttcatttttcttttaata

SEQ ID NO: 1600 - DNA, 20 bp, Artificial sequence
  Synthetic oligonucleotide
cctaatttcatttttctttt

SEQ ID NO: 1601 - DNA, 20 bp, Artificial sequence
  Synthetic oligonucleotide
tcctaatttcatttttcttt

SEQ ID NO: 1602 - DNA, 21 bp, Artificial sequence
  Synthetic oligonucleotide
ttcttcattataccatcaaat

SEQ ID NO: 1603 - DNA, 21 bp, Artificial sequence
  Synthetic oligonucleotide
tttcttcattataccatcaaa

SEQ ID NO: 1604 - DNA, 21 bp, Artificial sequence
  Synthetic oligonucleotide
ttttcttcattataccatcaa

SEQ ID NO: 1605 - DNA, 18 bp, Artificial sequence
  Synthetic oligonucleotide
tcttcattataccatcaa

SEQ ID NO: 1606 - DNA, 20 bp, Artificial sequence
  Synthetic oligonucleotide
tttcttcattataccatcaa

SEQ ID NO: 1607 - DNA, 19 bp, Artificial sequence
  Synthetic oligonucleotide
ttcttcattataccatcaa

SEQ ID NO: 1608 - DNA, 21 bp, Artificial sequence
  Synthetic oligonucleotide
atattttcttcattataccat

SEQ ID NO: 1609 - DNA, 20 bp, Artificial sequence
  Synthetic oligonucleotide
atattttcttcattatacca

SEQ ID NO: 1610 - DNA, 21 bp, Artificial sequence
  Synthetic oligonucleotide
aatattttcttcattatacca

SEQ ID NO: 1611 - DNA, 21 bp, Artificial sequence
  Synthetic oligonucleotide
aaatattttcttcattatacc

SEQ ID NO: 1612 - DNA, 19 bp, Artificial sequence
  Synthetic oligonucleotide
atattttcttcattatacc

SEQ ID NO: 1613 - DNA, 20 bp, Artificial sequence
  Synthetic oligonucleotide
aatattttcttcattatacc

SEQ ID NO: 1614 - DNA, 20 bp, Artificial sequence
  Synthetic oligonucleotide
taaatattttcttcattata

SEQ ID NO: 1615 - DNA, 19 bp, Artificial sequence
  Synthetic oligonucleotide
ttttccttcatctacttct

SEQ ID NO: 1616 - DNA, 20 bp, Artificial sequence
  Synthetic oligonucleotide
attttccttcatctacttct

SEQ ID NO: 1617 - DNA, 20 bp, Artificial sequence
  Synthetic oligonucleotide
aattttccttcatctacttc

SEQ ID NO: 1618 - DNA, 18 bp, Artificial sequence
  Synthetic oligonucleotide
agaattttccttcatcta

SEQ ID NO: 1619 - DNA, 18 bp, Artificial sequence
  Synthetic oligonucleotide
cagaattttccttcatct

SEQ ID NO: 1620 - DNA, 18 bp, Artificial sequence
  Synthetic oligonucleotide
tcagaattttccttcatc

SEQ ID NO: 1621 - DNA, 18 bp, Artificial sequence
  Synthetic oligonucleotide
ctagaaatatctcacatt

SEQ ID NO: 1622 - DNA, 17 bp, Artificial sequence
  Synthetic oligonucleotide
ctagaaatatctcacat

SEQ ID NO: 1623 - DNA, 17 bp, Artificial sequence
  Synthetic oligonucleotide
actagaaatatctcaca

SEQ ID NO: 1624 - DNA, 17 bp, Artificial sequence
  Synthetic oligonucleotide
attagccattaatctat

SEQ ID NO: 1625 - DNA, 18 bp, Artificial sequence
  Synthetic oligonucleotide
ttgttacaaaataatcca

SEQ ID NO: 1626 - DNA, 19 bp, Artificial sequence
  Synthetic oligonucleotide
ttattttttacattaacta

SEQ ID NO: 1627 - DNA, 19 bp, Artificial sequence
  Synthetic oligonucleotide
tgccaaaatactaacatca

SEQ ID NO: 1628 - DNA, 18 bp, Artificial sequence
  Synthetic oligonucleotide
gccaaaatactaacatca

SEQ ID NO: 1629 - DNA, 18 bp, Artificial sequence
  Synthetic oligonucleotide
tgccaaaatactaacatc

SEQ ID NO: 1630 - DNA, 16 bp, Artificial sequence
  Synthetic oligonucleotide
gagtacaacacttaca

SEQ ID NO: 1631 - DNA, 18 bp, Artificial sequence
  Synthetic oligonucleotide
cacatccattcattttat

SEQ ID NO: 1632 - DNA, 19 bp, Artificial sequence
  Synthetic oligonucleotide
ccacatccattcattttat

SEQ ID NO: 1633 - DNA, 18 bp, Artificial sequence
  Synthetic oligonucleotide
ccacatccattcatttta

SEQ ID NO: 1634 - DNA, 18 bp, Artificial sequence
  Synthetic oligonucleotide
tatgccacatccattcat

SEQ ID NO: 1635 - DNA, 18 bp, Artificial sequence
  Synthetic oligonucleotide
ttatgccacatccattca

SEQ ID NO: 1636 - DNA, 17 bp, Artificial sequence
  Synthetic oligonucleotide
tatgccacatccattca

SEQ ID NO: 1637 - DNA, 17 bp, Artificial sequence
  Synthetic oligonucleotide
ttatgccacatccattc

SEQ ID NO: 1638 - DNA, 17 bp, Artificial sequence
  Synthetic oligonucleotide
attatgccacatccatt

SEQ ID NO: 1639 - DNA, 18 bp, Artificial sequence
  Synthetic oligonucleotide
agtttcatatttttaatc

SEQ ID NO: 1640 - DNA, 17 bp, Artificial sequence
  Synthetic oligonucleotide
atcactgcacactttcc

SEQ ID NO: 1641 - DNA, 18 bp, Artificial sequence
  Synthetic oligonucleotide
aagctctttccaaattct

SEQ ID NO: 1642 - DNA, 18 bp, Artificial sequence
  Synthetic oligonucleotide
tagttcttaactcttctc

SEQ ID NO: 1643 - DNA, 17 bp, Artificial sequence
  Synthetic oligonucleotide
ttagttcttaactcttc

SEQ ID NO: 1644 - DNA, 17 bp, Artificial sequence
  Synthetic oligonucleotide
agcttcaaatactcaaa

SEQ ID NO: 1645 - DNA, 17 bp, Artificial sequence
  Synthetic oligonucleotide
tttcaaagccacaccta

SEQ ID NO: 1646 - DNA, 19 bp, Artificial sequence
  Synthetic oligonucleotide
aatatcctcattacccatt

SEQ ID NO: 1647 - DNA, 17 bp, Artificial sequence
  Synthetic oligonucleotide
tatcctcattacccatt

SEQ ID NO: 1648 - DNA, 18 bp, Artificial sequence
  Synthetic oligonucleotide
atatcctcattacccatt

SEQ ID NO: 1649 - DNA, 18 bp, Artificial sequence
  Synthetic oligonucleotide
aatatcctcattacccat

SEQ ID NO: 1650 - DNA, 19 bp, Artificial sequence
  Synthetic oligonucleotide
taatatcctcattacccat

SEQ ID NO: 1651 - DNA, 20 bp, Artificial sequence
  Synthetic oligonucleotide
ttaatatcctcattacccat

SEQ ID NO: 1652 - DNA, 17 bp, Artificial sequence
  Synthetic oligonucleotide
atatcctcattacccat

SEQ ID NO: 1653 - DNA, 17 bp, Artificial sequence
  Synthetic oligonucleotide
aatatcctcattaccca

SEQ ID NO: 1654 - DNA, 18 bp, Artificial sequence
  Synthetic oligonucleotide
taatatcctcattaccca

SEQ ID NO: 1655 - DNA, 20 bp, Artificial sequence
  Synthetic oligonucleotide
tttaatatcctcattaccca

SEQ ID NO: 1656 - DNA, 19 bp, Artificial sequence
  Synthetic oligonucleotide
ttaatatcctcattaccca

SEQ ID NO: 1657 - DNA, 20 bp, Artificial sequence
  Synthetic oligonucleotide
atttaatatcctcattaccc

SEQ ID NO: 1658 - DNA, 17 bp, Artificial sequence
  Synthetic oligonucleotide
taatatcctcattaccc

SEQ ID NO: 1659 - DNA, 18 bp, Artificial sequence
  Synthetic oligonucleotide
ttaatatcctcattaccc

SEQ ID NO: 1660 - DNA, 19 bp, Artificial sequence
  Synthetic oligonucleotide
tttaatatcctcattaccc

SEQ ID NO: 1661 - DNA, 21 bp, Artificial sequence
  Synthetic oligonucleotide
aatttaatatcctcattaccc

SEQ ID NO: 1662 - DNA, 18 bp, Artificial sequence
  Synthetic oligonucleotide
tttaatatcctcattacc

SEQ ID NO: 1663 - DNA, 20 bp, Artificial sequence
  Synthetic oligonucleotide
aatttaatatcctcattacc

SEQ ID NO: 1664 - DNA, 17 bp, Artificial sequence
  Synthetic oligonucleotide
ttaatatcctcattacc

SEQ ID NO: 1665 - DNA, 21 bp, Artificial sequence
  Synthetic oligonucleotide
aaatttaatatcctcattacc

SEQ ID NO: 1666 - DNA, 19 bp, Artificial sequence
  Synthetic oligonucleotide
atttaatatcctcattacc

SEQ ID NO: 1667 - DNA, 21 bp, Artificial sequence
  Synthetic oligonucleotide
taaatttaatatcctcattac

SEQ ID NO: 1668 - DNA, 21 bp, Artificial sequence
  Synthetic oligonucleotide
ttaaatttaatatcctcatta

SEQ ID NO: 1669 - DNA, 21 bp, Artificial sequence
  Synthetic oligonucleotide
cttaaatttaatatcctcatt

SEQ ID NO: 1670 - DNA, 21 bp, Artificial sequence
  Synthetic oligonucleotide
tcttaaatttaatatcctcat

SEQ ID NO: 1671 - DNA, 20 bp, Artificial sequence
  Synthetic oligonucleotide
tcttaaatttaatatcctca

SEQ ID NO: 1672 - DNA, 21 bp, Artificial sequence
  Synthetic oligonucleotide
ttcttaaatttaatatcctca

SEQ ID NO: 1673 - DNA, 20 bp, Artificial sequence
  Synthetic oligonucleotide
ttcttaaatttaatatcctc

SEQ ID NO: 1674 - DNA, 19 bp, Artificial sequence
  Synthetic oligonucleotide
tcttaaatttaatatcctc

SEQ ID NO: 1675 - DNA, 19 bp, Artificial sequence
  Synthetic oligonucleotide
ttcttaaatttaatatcct

SEQ ID NO: 1676 - DNA, 18 bp, Artificial sequence
  Synthetic oligonucleotide
tcttaaatttaatatcct

SEQ ID NO: 1677 - DNA, 17 bp, Artificial sequence
  Synthetic oligonucleotide
aatagcctttattctac

SEQ ID NO: 1678 - DNA, 18 bp, Artificial sequence
  Synthetic oligonucleotide
cagcaacaattattaata

SEQ ID NO: 1679 - DNA, 18 bp, Artificial sequence
  Synthetic oligonucleotide
ccagcaacaattattaat

SEQ ID NO: 1680 - DNA, 18 bp, Artificial sequence
  Synthetic oligonucleotide
accagcaacaattattaa

SEQ ID NO: 1681 - DNA, 17 bp, Artificial sequence
  Synthetic oligonucleotide
accagcaacaattatta

SEQ ID NO: 1682 - DNA, 17 bp, Artificial sequence
  Synthetic oligonucleotide
taccagcaacaattatt

SEQ ID NO: 1683 - DNA, 20 bp, Artificial sequence
  Synthetic oligonucleotide
ccccaaatctaaaacacttc

SEQ ID NO: 1684 - DNA, 21 bp, Artificial sequence
  Synthetic oligonucleotide
aaccccaaatctaaaacactt

SEQ ID NO: 1685 - DNA, 19 bp, Artificial sequence
  Synthetic oligonucleotide
ccccaaatctaaaacactt

SEQ ID NO: 1686 - DNA, 20 bp, Artificial sequence
  Synthetic oligonucleotide
aaccccaaatctaaaacact

SEQ ID NO: 1687 - DNA, 19 bp, Artificial sequence
  Synthetic oligonucleotide
accccaaatctaaaacact

SEQ ID NO: 1688 - DNA, 18 bp, Artificial sequence
  Synthetic oligonucleotide
accccaaatctaaaacac

SEQ ID NO: 1689 - DNA, 19 bp, Artificial sequence
  Synthetic oligonucleotide
gcaaatattcacaaatcct

SEQ ID NO: 1690 - DNA, 21 bp, Artificial sequence
  Synthetic oligonucleotide
actatttaacacacattatca

SEQ ID NO: 1691 - DNA, 20 bp, Artificial sequence
  Synthetic oligonucleotide
ctatttaacacacattatca

SEQ ID NO: 1692 - DNA, 21 bp, Artificial sequence
  Synthetic oligonucleotide
tactatttaacacacattatc

SEQ ID NO: 1693 - DNA, 20 bp, Artificial sequence
  Synthetic oligonucleotide
actatttaacacacattatc

SEQ ID NO: 1694 - DNA, 20 bp, Artificial sequence
  Synthetic oligonucleotide
tactatttaacacacattat

SEQ ID NO: 1695 - DNA, 21 bp, Artificial sequence
  Synthetic oligonucleotide
ctactatttaacacacattat

SEQ ID NO: 1696 - DNA, 20 bp, Artificial sequence
  Synthetic oligonucleotide
ctactatttaacacacatta

SEQ ID NO: 1697 - DNA, 21 bp, Artificial sequence
  Synthetic oligonucleotide
actactatttaacacacatta

SEQ ID NO: 1698 - DNA, 19 bp, Artificial sequence
  Synthetic oligonucleotide
ctactatttaacacacatt

SEQ ID NO: 1699 - DNA, 20 bp, Artificial sequence
  Synthetic oligonucleotide
actactatttaacacacatt

SEQ ID NO: 1700 - DNA, 19 bp, Artificial sequence
  Synthetic oligonucleotide
actactatttaacacacat

SEQ ID NO: 1701 - DNA, 17 bp, Artificial sequence
  Synthetic oligonucleotide
ctactatttaacacaca

SEQ ID NO: 1702 - DNA, 18 bp, Artificial sequence
  Synthetic oligonucleotide
actactatttaacacaca

SEQ ID NO: 1703 - DNA, 17 bp, Artificial sequence
  Synthetic oligonucleotide
tatagacccttaatatt

SEQ ID NO: 1704 - DNA, 17 bp, Artificial sequence
  Synthetic oligonucleotide
ttatagacccttaatat

SEQ ID NO: 1705 - DNA, 21 bp, Artificial sequence
  Synthetic oligonucleotide
catcacaaaataacctatcat

SEQ ID NO: 1706 - DNA, 21 bp, Artificial sequence
  Synthetic oligonucleotide
tcatcacaaaataacctatca

SEQ ID NO: 1707 - DNA, 21 bp, Artificial sequence
  Synthetic oligonucleotide
ttcatcacaaaataacctatc

SEQ ID NO: 1708 - DNA, 19 bp, Artificial sequence
  Synthetic oligonucleotide
ttcatcacaaaataaccta

SEQ ID NO: 1709 - DNA, 20 bp, Artificial sequence
  Synthetic oligonucleotide
tttcatcacaaaataaccta

SEQ ID NO: 1710 - DNA, 18 bp, Artificial sequence
  Synthetic oligonucleotide
tcatcacaaaataaccta

SEQ ID NO: 1711 - DNA, 21 bp, Artificial sequence
  Synthetic oligonucleotide
ttttcatcacaaaataaccta

SEQ ID NO: 1712 - DNA, 21 bp, Artificial sequence
  Synthetic oligonucleotide
attttcatcacaaaataacct

SEQ ID NO: 1713 - DNA, 21 bp, Artificial sequence
  Synthetic oligonucleotide
tattttcatcacaaaataacc

SEQ ID NO: 1714 - DNA, 19 bp, Artificial sequence
  Synthetic oligonucleotide
gtattttcatcacaaaata

SEQ ID NO: 1715 - DNA, 16 bp, Artificial sequence
  Synthetic oligonucleotide
ttacctagatcactcc

SEQ ID NO: 1716 - DNA, 16 bp, Artificial sequence
  Synthetic oligonucleotide
cttacctagatcactc

SEQ ID NO: 1717 - DNA, 16 bp, Artificial sequence
  Synthetic oligonucleotide
ccttacctagatcact

SEQ ID NO: 1718 - DNA, 17 bp, Artificial sequence
  Synthetic oligonucleotide
taactgctccttaatcc

SEQ ID NO: 1719 - DNA, 17 bp, Artificial sequence
  Synthetic oligonucleotide
tctagcaatcctctcct

SEQ ID NO: 1720 - DNA, 17 bp, Artificial sequence
  Synthetic oligonucleotide
ttctagcaatcctctcc

SEQ ID NO: 1721 - DNA, 21 bp, Artificial sequence
  Synthetic oligonucleotide
ttttcacctactaatattcat

SEQ ID NO: 1722 - DNA, 20 bp, Artificial sequence
  Synthetic oligonucleotide
tttcacctactaatattcat

SEQ ID NO: 1723 - DNA, 19 bp, Artificial sequence
  Synthetic oligonucleotide
ttcacctactaatattcat

SEQ ID NO: 1724 - DNA, 18 bp, Artificial sequence
  Synthetic oligonucleotide
tcacctactaatattcat

SEQ ID NO: 1725 - DNA, 17 bp, Artificial sequence
  Synthetic oligonucleotide
tcacctactaatattca

SEQ ID NO: 1726 - DNA, 19 bp, Artificial sequence
  Synthetic oligonucleotide
tttcacctactaatattca

SEQ ID NO: 1727 - DNA, 20 bp, Artificial sequence
  Synthetic oligonucleotide
ttttcacctactaatattca

SEQ ID NO: 1728 - DNA, 21 bp, Artificial sequence
  Synthetic oligonucleotide
tttttcacctactaatattca

SEQ ID NO: 1729 - DNA, 18 bp, Artificial sequence
  Synthetic oligonucleotide
ttcacctactaatattca

SEQ ID NO: 1730 - DNA, 21 bp, Artificial sequence
  Synthetic oligonucleotide
atttttcacctactaatattc

SEQ ID NO: 1731 - DNA, 20 bp, Artificial sequence
  Synthetic oligonucleotide
tttttcacctactaatattc

SEQ ID NO: 1732 - DNA, 21 bp, Artificial sequence
  Synthetic oligonucleotide
tatttttcacctactaatatt

SEQ ID NO: 1733 - DNA, 20 bp, Artificial sequence
  Synthetic oligonucleotide
tatttttcacctactaatat

SEQ ID NO: 1734 - DNA, 21 bp, Artificial sequence
  Synthetic oligonucleotide
ttatttttcacctactaatat

SEQ ID NO: 1735 - DNA, 20 bp, Artificial sequence
  Synthetic oligonucleotide
ttatttttcacctactaata

SEQ ID NO: 1736 - DNA, 19 bp, Artificial sequence
  Synthetic oligonucleotide
tatttttcacctactaata

SEQ ID NO: 1737 - DNA, 21 bp, Artificial sequence
  Synthetic oligonucleotide
tttatttttcacctactaata

SEQ ID NO: 1738 - DNA, 19 bp, Artificial sequence
  Synthetic oligonucleotide
tttatttttcacctactaa

SEQ ID NO: 1739 - DNA, 18 bp, Artificial sequence
  Synthetic oligonucleotide
tttatttttcacctacta

SEQ ID NO: 1740 - DNA, 20 bp, Artificial sequence
  Synthetic oligonucleotide
ctcaacttctactactaatt

SEQ ID NO: 1741 - DNA, 21 bp, Artificial sequence
  Synthetic oligonucleotide
tctcaacttctactactaatt

SEQ ID NO: 1742 - DNA, 21 bp, Artificial sequence
  Synthetic oligonucleotide
ctctcaacttctactactaat

SEQ ID NO: 1743 - DNA, 19 bp, Artificial sequence
  Synthetic oligonucleotide
ctcaacttctactactaat

SEQ ID NO: 1744 - DNA, 20 bp, Artificial sequence
  Synthetic oligonucleotide
tctcaacttctactactaat

SEQ ID NO: 1745 - DNA, 21 bp, Artificial sequence
  Synthetic oligonucleotide
tctctcaacttctactactaa

SEQ ID NO: 1746 - DNA, 18 bp, Artificial sequence
  Synthetic oligonucleotide
ctcaacttctactactaa

SEQ ID NO: 1747 - DNA, 19 bp, Artificial sequence
  Synthetic oligonucleotide
tctcaacttctactactaa

SEQ ID NO: 1748 - DNA, 17 bp, Artificial sequence
  Synthetic oligonucleotide
ctcaacttctactacta

SEQ ID NO: 1749 - DNA, 21 bp, Artificial sequence
  Synthetic oligonucleotide
ttctctcaacttctactacta

SEQ ID NO: 1750 - DNA, 20 bp, Artificial sequence
  Synthetic oligonucleotide
tctctcaacttctactacta

SEQ ID NO: 1751 - DNA, 18 bp, Artificial sequence
  Synthetic oligonucleotide
tctcaacttctactacta

SEQ ID NO: 1752 - DNA, 19 bp, Artificial sequence
  Synthetic oligonucleotide
ctctcaacttctactacta

SEQ ID NO: 1753 - DNA, 18 bp, Artificial sequence
  Synthetic oligonucleotide
ctctcaacttctactact

SEQ ID NO: 1754 - DNA, 17 bp, Artificial sequence
  Synthetic oligonucleotide
tctcaacttctactact

SEQ ID NO: 1755 - DNA, 19 bp, Artificial sequence
  Synthetic oligonucleotide
tctctcaacttctactact

SEQ ID NO: 1756 - DNA, 21 bp, Artificial sequence
  Synthetic oligonucleotide
tttctctcaacttctactact

SEQ ID NO: 1757 - DNA, 20 bp, Artificial sequence
  Synthetic oligonucleotide
ttctctcaacttctactact

SEQ ID NO: 1758 - DNA, 20 bp, Artificial sequence
  Synthetic oligonucleotide
tttctctcaacttctactac

SEQ ID NO: 1759 - DNA, 17 bp, Artificial sequence
  Synthetic oligonucleotide
ctctcaacttctactac

SEQ ID NO: 1760 - DNA, 19 bp, Artificial sequence
  Synthetic oligonucleotide
ttctctcaacttctactac

SEQ ID NO: 1761 - DNA, 21 bp, Artificial sequence
  Synthetic oligonucleotide
ttttctctcaacttctactac

SEQ ID NO: 1762 - DNA, 18 bp, Artificial sequence
  Synthetic oligonucleotide
tctctcaacttctactac

SEQ ID NO: 1763 - DNA, 19 bp, Artificial sequence
  Synthetic oligonucleotide
tttctctcaacttctacta

SEQ ID NO: 1764 - DNA, 20 bp, Artificial sequence
  Synthetic oligonucleotide
ttttctctcaacttctacta

SEQ ID NO: 1765 - DNA, 21 bp, Artificial sequence
  Synthetic oligonucleotide
tttttctctcaacttctacta

SEQ ID NO: 1766 - DNA, 17 bp, Artificial sequence
  Synthetic oligonucleotide
tctctcaacttctacta

SEQ ID NO: 1767 - DNA, 18 bp, Artificial sequence
  Synthetic oligonucleotide
ttctctcaacttctacta

SEQ ID NO: 1768 - DNA, 18 bp, Artificial sequence
  Synthetic oligonucleotide
tttctctcaacttctact

SEQ ID NO: 1769 - DNA, 19 bp, Artificial sequence
  Synthetic oligonucleotide
ttttctctcaacttctact

SEQ ID NO: 1770 - DNA, 21 bp, Artificial sequence
  Synthetic oligonucleotide
ctttttctctcaacttctact

SEQ ID NO: 1771 - DNA, 20 bp, Artificial sequence
  Synthetic oligonucleotide
tttttctctcaacttctact

SEQ ID NO: 1772 - DNA, 20 bp, Artificial sequence
  Synthetic oligonucleotide
ctttttctctcaacttctac

SEQ ID NO: 1773 - DNA, 21 bp, Artificial sequence
  Synthetic oligonucleotide
actttttctctcaacttctac

SEQ ID NO: 1774 - DNA, 18 bp, Artificial sequence
  Synthetic oligonucleotide
ttttctctcaacttctac

SEQ ID NO: 1775 - DNA, 19 bp, Artificial sequence
  Synthetic oligonucleotide
tttttctctcaacttctac

SEQ ID NO: 1776 - DNA, 19 bp, Artificial sequence
  Synthetic oligonucleotide
ctttttctctcaacttcta

SEQ ID NO: 1777 - DNA, 21 bp, Artificial sequence
  Synthetic oligonucleotide
tactttttctctcaacttcta

SEQ ID NO: 1778 - DNA, 20 bp, Artificial sequence
  Synthetic oligonucleotide
actttttctctcaacttcta

SEQ ID NO: 1779 - DNA, 18 bp, Artificial sequence
  Synthetic oligonucleotide
tttttctctcaacttcta

SEQ ID NO: 1780 - DNA, 20 bp, Artificial sequence
  Synthetic oligonucleotide
tactttttctctcaacttct

SEQ ID NO: 1781 - DNA, 21 bp, Artificial sequence
  Synthetic oligonucleotide
ttactttttctctcaacttct

SEQ ID NO: 1782 - DNA, 20 bp, Artificial sequence
  Synthetic oligonucleotide
ttactttttctctcaacttc

SEQ ID NO: 1783 - DNA, 19 bp, Artificial sequence
  Synthetic oligonucleotide
tactttttctctcaacttc

SEQ ID NO: 1784 - DNA, 18 bp, Artificial sequence
  Synthetic oligonucleotide
actttttctctcaacttc

SEQ ID NO: 1785 - DNA, 19 bp, Artificial sequence
  Synthetic oligonucleotide
ttactttttctctcaactt

SEQ ID NO: 1786 - DNA, 18 bp, Artificial sequence
  Synthetic oligonucleotide
tactttttctctcaactt

SEQ ID NO: 1787 - DNA, 18 bp, Artificial sequence
  Synthetic oligonucleotide
ttactttttctctcaact

SEQ ID NO: 1788 - DNA, 19 bp, Artificial sequence
  Synthetic oligonucleotide
gttactttttctctcaact

SEQ ID NO: 1789 - DNA, 18 bp, Artificial sequence
  Synthetic oligonucleotide
gttactttttctctcaac

SEQ ID NO: 1790 - DNA, 17 bp, Artificial sequence
  Synthetic oligonucleotide
gttactttttctctcaa

SEQ ID NO: 1791 - DNA, 18 bp, Artificial sequence
  Synthetic oligonucleotide
agttactttttctctcaa

SEQ ID NO: 1792 - DNA, 20 bp, Artificial sequence
  Synthetic oligonucleotide
cttttacattcccattaaca

SEQ ID NO: 1793 - DNA, 21 bp, Artificial sequence
  Synthetic oligonucleotide
cacttttacattcccattaac

SEQ ID NO: 1794 - DNA, 19 bp, Artificial sequence
  Synthetic oligonucleotide
cttttacattcccattaac

SEQ ID NO: 1795 - DNA, 20 bp, Artificial sequence
  Synthetic oligonucleotide
acttttacattcccattaac

SEQ ID NO: 1796 - DNA, 19 bp, Artificial sequence
  Synthetic oligonucleotide
acttttacattcccattaa

SEQ ID NO: 1797 - DNA, 18 bp, Artificial sequence
  Synthetic oligonucleotide
cttttacattcccattaa

SEQ ID NO: 1798 - DNA, 20 bp, Artificial sequence
  Synthetic oligonucleotide
cacttttacattcccattaa

SEQ ID NO: 1799 - DNA, 21 bp, Artificial sequence
  Synthetic oligonucleotide
tacacttttacattcccatta

SEQ ID NO: 1800 - DNA, 18 bp, Artificial sequence
  Synthetic oligonucleotide
acttttacattcccatta

SEQ ID NO: 1801 - DNA, 19 bp, Artificial sequence
  Synthetic oligonucleotide
cacttttacattcccatta

SEQ ID NO: 1802 - DNA, 20 bp, Artificial sequence
  Synthetic oligonucleotide
acacttttacattcccatta

SEQ ID NO: 1803 - DNA, 18 bp, Artificial sequence
  Synthetic oligonucleotide
cacttttacattcccatt

SEQ ID NO: 1804 - DNA, 20 bp, Artificial sequence
  Synthetic oligonucleotide
tacacttttacattcccatt

SEQ ID NO: 1805 - DNA, 19 bp, Artificial sequence
  Synthetic oligonucleotide
acacttttacattcccatt

SEQ ID NO: 1806 - DNA, 19 bp, Artificial sequence
  Synthetic oligonucleotide
tacacttttacattcccat

SEQ ID NO: 1807 - DNA, 18 bp, Artificial sequence
  Synthetic oligonucleotide
tacacttttacattccca

SEQ ID NO: 1808 - DNA, 19 bp, Artificial sequence
  Synthetic oligonucleotide
gtacacttttacattccca

SEQ ID NO: 1809 - DNA, 18 bp, Artificial sequence
  Synthetic oligonucleotide
gtacacttttacattccc

SEQ ID NO: 1810 - DNA, 17 bp, Artificial sequence
  Synthetic oligonucleotide
tacacttttacattccc

SEQ ID NO: 1811 - DNA, 19 bp, Artificial sequence
  Synthetic oligonucleotide
tgtacacttttacattccc

SEQ ID NO: 1812 - DNA, 18 bp, Artificial sequence
  Synthetic oligonucleotide
tgtacacttttacattcc

SEQ ID NO: 1813 - DNA, 18 bp, Artificial sequence
  Synthetic oligonucleotide
ctgtacacttttacattc

SEQ ID NO: 1814 - DNA, 18 bp, Artificial sequence
  Synthetic oligonucleotide
atcttatttacatcttcc

SEQ ID NO: 1815 - DNA, 19 bp, Artificial sequence
  Synthetic oligonucleotide
gaatcttatttacatcttc

SEQ ID NO: 1816 - DNA, 18 bp, Artificial sequence
  Synthetic oligonucleotide
gaatcttatttacatctt

SEQ ID NO: 1817 - DNA, 18 bp, Artificial sequence
  Synthetic oligonucleotide
tgaatcttatttacatct

SEQ ID NO: 1818 - DNA, 17 bp, Artificial sequence
  Synthetic oligonucleotide
attcagctttttcaatc

SEQ ID NO: 1819 - DNA, 20 bp, Artificial sequence
  Synthetic oligonucleotide
ttaattttcccttcactcct

SEQ ID NO: 1820 - DNA, 19 bp, Artificial sequence
  Synthetic oligonucleotide
ttaattttcccttcactcc

SEQ ID NO: 1821 - DNA, 18 bp, Artificial sequence
  Synthetic oligonucleotide
ttaattttcccttcactc

SEQ ID NO: 1822 - DNA, 19 bp, Artificial sequence
  Synthetic oligonucleotide
gttaattttcccttcactc

SEQ ID NO: 1823 - DNA, 21 bp, Artificial sequence
  Synthetic oligonucleotide
caaaattacttcttttatcat

SEQ ID NO: 1824 - DNA, 21 bp, Artificial sequence
  Synthetic oligonucleotide
ccaaaattacttcttttatca

SEQ ID NO: 1825 - DNA, 21 bp, Artificial sequence
  Synthetic oligonucleotide
tccaaaattacttcttttatc

SEQ ID NO: 1826 - DNA, 20 bp, Artificial sequence
  Synthetic oligonucleotide
tccaaaattacttcttttat

SEQ ID NO: 1827 - DNA, 19 bp, Artificial sequence
  Synthetic oligonucleotide
ccaaaattacttcttttat

SEQ ID NO: 1828 - DNA, 21 bp, Artificial sequence
  Synthetic oligonucleotide
ttccaaaattacttcttttat

SEQ ID NO: 1829 - DNA, 19 bp, Artificial sequence
  Synthetic oligonucleotide
tccaaaattacttctttta

SEQ ID NO: 1830 - DNA, 20 bp, Artificial sequence
  Synthetic oligonucleotide
ttccaaaattacttctttta

SEQ ID NO: 1831 - DNA, 19 bp, Artificial sequence
  Synthetic oligonucleotide
gttccaaaattacttcttt

SEQ ID NO: 1832 - DNA, 18 bp, Artificial sequence
  Synthetic oligonucleotide
gttccaaaattacttctt

SEQ ID NO: 1833 - DNA, 18 bp, Artificial sequence
  Synthetic oligonucleotide
tgttccaaaattacttct

SEQ ID NO: 1834 - DNA, 18 bp, Artificial sequence
  Synthetic oligonucleotide
atgttccaaaattacttc

SEQ ID NO: 1835 - DNA, 20 bp, Artificial sequence
  Synthetic oligonucleotide
catattttactctttttatt

SEQ ID NO: 1836 - DNA, 20 bp, Artificial sequence
  Synthetic oligonucleotide
ccatattttactctttttat

SEQ ID NO: 1837 - DNA, 21 bp, Artificial sequence
  Synthetic oligonucleotide
cccatattttactctttttat

SEQ ID NO: 1838 - DNA, 19 bp, Artificial sequence
  Synthetic oligonucleotide
catattttactctttttat

SEQ ID NO: 1839 - DNA, 20 bp, Artificial sequence
  Synthetic oligonucleotide
cccatattttactcttttta

SEQ ID NO: 1840 - DNA, 19 bp, Artificial sequence
  Synthetic oligonucleotide
ccatattttactcttttta

SEQ ID NO: 1841 - DNA, 21 bp, Artificial sequence
  Synthetic oligonucleotide
acccatattttactcttttta

SEQ ID NO: 1842 - DNA, 18 bp, Artificial sequence
  Synthetic oligonucleotide
ccatattttactcttttt

SEQ ID NO: 1843 - DNA, 19 bp, Artificial sequence
  Synthetic oligonucleotide
cccatattttactcttttt

SEQ ID NO: 1844 - DNA, 20 bp, Artificial sequence
  Synthetic oligonucleotide
acccatattttactcttttt

SEQ ID NO: 1845 - DNA, 21 bp, Artificial sequence
  Synthetic oligonucleotide
tacccatattttactcttttt

SEQ ID NO: 1846 - DNA, 20 bp, Artificial sequence
  Synthetic oligonucleotide
tacccatattttactctttt

SEQ ID NO: 1847 - DNA, 18 bp, Artificial sequence
  Synthetic oligonucleotide
cccatattttactctttt

SEQ ID NO: 1848 - DNA, 19 bp, Artificial sequence
  Synthetic oligonucleotide
acccatattttactctttt

SEQ ID NO: 1849 - DNA, 21 bp, Artificial sequence
  Synthetic oligonucleotide
ttacccatattttactctttt

SEQ ID NO: 1850 - DNA, 19 bp, Artificial sequence
  Synthetic oligonucleotide
tacccatattttactcttt

SEQ ID NO: 1851 - DNA, 18 bp, Artificial sequence
  Synthetic oligonucleotide
acccatattttactcttt

SEQ ID NO: 1852 - DNA, 20 bp, Artificial sequence
  Synthetic oligonucleotide
ttacccatattttactcttt

SEQ ID NO: 1853 - DNA, 21 bp, Artificial sequence
  Synthetic oligonucleotide
tttacccatattttactcttt

SEQ ID NO: 1854 - DNA, 19 bp, Artificial sequence
  Synthetic oligonucleotide
ttacccatattttactctt

SEQ ID NO: 1855 - DNA, 20 bp, Artificial sequence
  Synthetic oligonucleotide
tttacccatattttactctt

SEQ ID NO: 1856 - DNA, 17 bp, Artificial sequence
  Synthetic oligonucleotide
acccatattttactctt

SEQ ID NO: 1857 - DNA, 18 bp, Artificial sequence
  Synthetic oligonucleotide
tacccatattttactctt

SEQ ID NO: 1858 - DNA, 17 bp, Artificial sequence
  Synthetic oligonucleotide
tacccatattttactct

SEQ ID NO: 1859 - DNA, 18 bp, Artificial sequence
  Synthetic oligonucleotide
ttacccatattttactct

SEQ ID NO: 1860 - DNA, 19 bp, Artificial sequence
  Synthetic oligonucleotide
tttacccatattttactct

SEQ ID NO: 1861 - DNA, 17 bp, Artificial sequence
  Synthetic oligonucleotide
ttacccatattttactc

SEQ ID NO: 1862 - DNA, 18 bp, Artificial sequence
  Synthetic oligonucleotide
tttacccatattttactc

SEQ ID NO: 1863 - DNA, 19 bp, Artificial sequence
  Synthetic oligonucleotide
gtttacccatattttactc

SEQ ID NO: 1864 - DNA, 18 bp, Artificial sequence
  Synthetic oligonucleotide
gtttacccatattttact

SEQ ID NO: 1865 - DNA, 18 bp, Artificial sequence
  Synthetic oligonucleotide
tgtttacccatattttac

SEQ ID NO: 1866 - DNA, 17 bp, Artificial sequence
  Synthetic oligonucleotide
gtttacccatattttac

SEQ ID NO: 1867 - DNA, 17 bp, Artificial sequence
  Synthetic oligonucleotide
tgtttacccatatttta

SEQ ID NO: 1868 - DNA, 17 bp, Artificial sequence
  Synthetic oligonucleotide
ttcttgcttcaaccatc

SEQ ID NO: 1869 - DNA, 17 bp, Artificial sequence
  Synthetic oligonucleotide
gttacctccctttatat

SEQ ID NO: 1870 - DNA, 16 bp, Artificial sequence
  Synthetic oligonucleotide
ggttacctccctttat

SEQ ID NO: 1871 - DNA, 16 bp, Artificial sequence
  Synthetic oligonucleotide
aggttacctcccttta

SEQ ID NO: 1872 - DNA, 18 bp, Artificial sequence
  Synthetic oligonucleotide
atgttctctatctctata

SEQ ID NO: 1873 - DNA, 17 bp, Artificial sequence
  Synthetic oligonucleotide
tatgttctctatctcta

SEQ ID NO: 1874 - DNA, 17 bp, Artificial sequence
  Synthetic oligonucleotide
agatcaaactaaaacct

SEQ ID NO: 1875 - DNA, 17 bp, Artificial sequence
  Synthetic oligonucleotide
tgcccaatttcacccaa

SEQ ID NO: 1876 - DNA, 17 bp, Artificial sequence
  Synthetic oligonucleotide
tttgcccaatttcaccc

SEQ ID NO: 1877 - DNA, 17 bp, Artificial sequence
  Synthetic oligonucleotide
ttttgcccaatttcacc

SEQ ID NO: 1878 - DNA, 18 bp, Artificial sequence
  Synthetic oligonucleotide
tgtatatcaacaattcat

SEQ ID NO: 1879 - DNA, 20 bp, Artificial sequence
  Synthetic oligonucleotide
acatttctttaaaatttcca

SEQ ID NO: 1880 - DNA, 21 bp, Artificial sequence
  Synthetic oligonucleotide
cacatttctttaaaatttcca

SEQ ID NO: 1881 - DNA, 21 bp, Artificial sequence
  Synthetic oligonucleotide
ccacatttctttaaaatttcc

SEQ ID NO: 1882 - DNA, 20 bp, Artificial sequence
  Synthetic oligonucleotide
cacatttctttaaaatttcc

SEQ ID NO: 1883 - DNA, 19 bp, Artificial sequence
  Synthetic oligonucleotide
acatttctttaaaatttcc

SEQ ID NO: 1884 - DNA, 20 bp, Artificial sequence
  Synthetic oligonucleotide
ccacatttctttaaaatttc

SEQ ID NO: 1885 - DNA, 21 bp, Artificial sequence
  Synthetic oligonucleotide
accacatttctttaaaatttc

SEQ ID NO: 1886 - DNA, 20 bp, Artificial sequence
  Synthetic oligonucleotide
accacatttctttaaaattt

SEQ ID NO: 1887 - DNA, 20 bp, Artificial sequence
  Synthetic oligonucleotide
acaaaaccacatttctttaa

SEQ ID NO: 1888 - DNA, 18 bp, Artificial sequence
  Synthetic oligonucleotide
ctgttttcaaatcatttc

SEQ ID NO: 1889 - DNA, 19 bp, Artificial sequence
  Synthetic oligonucleotide
gaaccattactattatcaa

SEQ ID NO: 1890 - DNA, 19 bp, Artificial sequence
  Synthetic oligonucleotide
agaaccattactattatca

SEQ ID NO: 1891 - DNA, 18 bp, Artificial sequence
  Synthetic oligonucleotide
agaaccattactattatc

SEQ ID NO: 1892 - DNA, 18 bp, Artificial sequence
  Synthetic oligonucleotide
ctagaaccattactatta

SEQ ID NO: 1893 - DNA, 17 bp, Artificial sequence
  Synthetic oligonucleotide
tagaaccattactatta

SEQ ID NO: 1894 - DNA, 17 bp, Artificial sequence
  Synthetic oligonucleotide
ctagaaccattactatt

SEQ ID NO: 1895 - DNA, 19 bp, Artificial sequence
  Synthetic oligonucleotide
agattaccatctttcaaaa

SEQ ID NO: 1896 - DNA, 18 bp, Artificial sequence
  Synthetic oligonucleotide
agattaccatctttcaaa

SEQ ID NO: 1897 - DNA, 17 bp, Artificial sequence
  Synthetic oligonucleotide
agattaccatctttcaa

SEQ ID NO: 1898 - DNA, 17 bp, Artificial sequence
  Synthetic oligonucleotide
aagattaccatctttca

SEQ ID NO: 1899 - DNA, 18 bp, Artificial sequence
  Synthetic oligonucleotide
catgctcacacattttaa

SEQ ID NO: 1900 - DNA, 17 bp, Artificial sequence
  Synthetic oligonucleotide
cttaagctatctaaaca

SEQ ID NO: 1901 - DNA, 18 bp, Artificial sequence
  Synthetic oligonucleotide
tgaacaattcaacattca

SEQ ID NO: 1902 - DNA, 18 bp, Artificial sequence
  Synthetic oligonucleotide
gatcaaaaaactttccct

SEQ ID NO: 1903 - DNA, 19 bp, Artificial sequence
  Synthetic oligonucleotide
agatcaaaaaactttccct

SEQ ID NO: 1904 - DNA, 18 bp, Artificial sequence
  Synthetic oligonucleotide
agatcaaaaaactttccc

SEQ ID NO: 1905 - DNA, 17 bp, Artificial sequence
  Synthetic oligonucleotide
tcctagatcaaaaaact

SEQ ID NO: 1906 - DNA, 19 bp, Artificial sequence
  Synthetic oligonucleotide
attttttcttctcttttca

SEQ ID NO: 1907 - DNA, 20 bp, Artificial sequence
  Synthetic oligonucleotide
tattttttcttctcttttca

SEQ ID NO: 1908 - DNA, 20 bp, Artificial sequence
  Synthetic oligonucleotide
atattttttcttctcttttc

SEQ ID NO: 1909 - DNA, 18 bp, Artificial sequence
  Synthetic oligonucleotide
tctgctttaaaaactctc

SEQ ID NO: 1910 - DNA, 17 bp, Artificial sequence
  Synthetic oligonucleotide
ctctgctttaaaaactc

SEQ ID NO: 1911 - DNA, 19 bp, Artificial sequence
  Synthetic oligonucleotide
actacacaaacacattcaa

SEQ ID NO: 1912 - DNA, 21 bp, Artificial sequence
  Synthetic oligonucleotide
caaactacacaaacacattca

SEQ ID NO: 1913 - DNA, 21 bp, Artificial sequence
  Synthetic oligonucleotide
acaaactacacaaacacattc

SEQ ID NO: 1914 - DNA, 21 bp, Artificial sequence
  Synthetic oligonucleotide
caacaaactacacaaacacat

SEQ ID NO: 1915 - DNA, 21 bp, Artificial sequence
  Synthetic oligonucleotide
cacaacaaactacacaaacac

SEQ ID NO: 1916 - DNA, 21 bp, Artificial sequence
  Synthetic oligonucleotide
tcacaacaaactacacaaaca

SEQ ID NO: 1917 - DNA, 21 bp, Artificial sequence
  Synthetic oligonucleotide
ttcacaacaaactacacaaac

SEQ ID NO: 1918 - DNA, 21 bp, Artificial sequence
  Synthetic oligonucleotide
atttcacaacaaactacacaa

SEQ ID NO: 1919 - DNA, 21 bp, Artificial sequence
  Synthetic oligonucleotide
caatttcacaacaaactacac

SEQ ID NO: 1920 - DNA, 19 bp, Artificial sequence
  Synthetic oligonucleotide
tgtaacaatttcacaacaa

SEQ ID NO: 1921 - DNA, 18 bp, Artificial sequence
  Synthetic oligonucleotide
tgtaacaatttcacaaca

SEQ ID NO: 1922 - DNA, 17 bp, Artificial sequence
  Synthetic oligonucleotide
ttaagccaaccccacca

SEQ ID NO: 1923 - DNA, 17 bp, Artificial sequence
  Synthetic oligonucleotide
tttaagccaaccccacc

SEQ ID NO: 1924 - DNA, 17 bp, Artificial sequence
  Synthetic oligonucleotide
atttaagccaaccccac

SEQ ID NO: 1925 - DNA, 18 bp, Artificial sequence
  Synthetic oligonucleotide
ccagtaatacaaattata

SEQ ID NO: 1926 - DNA, 17 bp, Artificial sequence
  Synthetic oligonucleotide
cccagtaatacaaatta

SEQ ID NO: 1927 - DNA, 17 bp, Artificial sequence
  Synthetic oligonucleotide
tcccagtaatacaaatt

SEQ ID NO: 1928 - DNA, 17 bp, Artificial sequence
  Synthetic oligonucleotide
atcccagtaatacaaat

SEQ ID NO: 1929 - DNA, 17 bp, Artificial sequence
  Synthetic oligonucleotide
ctactagcatcaccact

SEQ ID NO: 1930 - DNA, 16 bp, Artificial sequence
  Synthetic oligonucleotide
ttctactagcatcacc

SEQ ID NO: 1931 - DNA, 16 bp, Artificial sequence
  Synthetic oligonucleotide
cttctactagcatcac

SEQ ID NO: 1932 - DNA, 21 bp, Artificial sequence
  Synthetic oligonucleotide
taaattactcattaaatccat

SEQ ID NO: 1933 - DNA, 21 bp, Artificial sequence
  Synthetic oligonucleotide
ataaattactcattaaatcca

SEQ ID NO: 1934 - DNA, 20 bp, Artificial sequence
  Synthetic oligonucleotide
taaattactcattaaatcca

SEQ ID NO: 1935 - DNA, 21 bp, Artificial sequence
  Synthetic oligonucleotide
cataaattactcattaaatcc

SEQ ID NO: 1936 - DNA, 18 bp, Artificial sequence
  Synthetic oligonucleotide
gatttatttttctactta

SEQ ID NO: 1937 - DNA, 21 bp, Artificial sequence
  Synthetic oligonucleotide
atacaacaaacaattcacttt

SEQ ID NO: 1938 - DNA, 19 bp, Artificial sequence
  Synthetic oligonucleotide
cgatacaacaaacaattca

SEQ ID NO: 1939 - DNA, 20 bp, Artificial sequence
  Synthetic oligonucleotide
gaacatccacactaacaaca

SEQ ID NO: 1940 - DNA, 18 bp, Artificial sequence
  Synthetic oligonucleotide
acatccacactaacaaca

SEQ ID NO: 1941 - DNA, 19 bp, Artificial sequence
  Synthetic oligonucleotide
gaacatccacactaacaac

SEQ ID NO: 1942 - DNA, 19 bp, Artificial sequence
  Synthetic oligonucleotide
tgaacatccacactaacaa

SEQ ID NO: 1943 - DNA, 19 bp, Artificial sequence
  Synthetic oligonucleotide
ttgaacatccacactaaca

SEQ ID NO: 1944 - DNA, 18 bp, Artificial sequence
  Synthetic oligonucleotide
tgaacatccacactaaca

SEQ ID NO: 1945 - DNA, 18 bp, Artificial sequence
  Synthetic oligonucleotide
cattgaacatccacacta

SEQ ID NO: 1946 - DNA, 17 bp, Artificial sequence
  Synthetic oligonucleotide
attgaacatccacacta

SEQ ID NO: 1947 - DNA, 17 bp, Artificial sequence
  Synthetic oligonucleotide
cattgaacatccacact

SEQ ID NO: 1948 - DNA, 17 bp, Artificial sequence
  Synthetic oligonucleotide
actcattgaacatccac

SEQ ID NO: 1949 - DNA, 20 bp, Artificial sequence
  Synthetic oligonucleotide
tatctttatttaataatctt

SEQ ID NO: 1950 - DNA, 17 bp, Artificial sequence
  Synthetic oligonucleotide
tctcaagcttcactcta

SEQ ID NO: 1951 - DNA, 19 bp, Artificial sequence
  Synthetic oligonucleotide
gacaatatattcctcaatc

SEQ ID NO: 1952 - DNA, 18 bp, Artificial sequence
  Synthetic oligonucleotide
gacaatatattcctcaat

SEQ ID NO: 1953 - DNA, 17 bp, Artificial sequence
  Synthetic oligonucleotide
tcctgtaacaattatac

SEQ ID NO: 1954 - DNA, 18 bp, Artificial sequence
  Synthetic oligonucleotide
acccagaataaaaaccac

SEQ ID NO: 1955 - DNA, 18 bp, Artificial sequence
  Synthetic oligonucleotide
ttccactttcttactccc

SEQ ID NO: 1956 - DNA, 17 bp, Artificial sequence
  Synthetic oligonucleotide
ttccactttcttactcc

SEQ ID NO: 1957 - DNA, 18 bp, Artificial sequence
  Synthetic oligonucleotide
tttccactttcttactcc

SEQ ID NO: 1958 - DNA, 17 bp, Artificial sequence
  Synthetic oligonucleotide
tttccactttcttactc

SEQ ID NO: 1959 - DNA, 17 bp, Artificial sequence
  Synthetic oligonucleotide
atccctttaccactttt

SEQ ID NO: 1960 - DNA, 18 bp, Artificial sequence
  Synthetic oligonucleotide
catccctttaccactttt

SEQ ID NO: 1961 - DNA, 18 bp, Artificial sequence
  Synthetic oligonucleotide
tcatccctttaccacttt

SEQ ID NO: 1962 - DNA, 17 bp, Artificial sequence
  Synthetic oligonucleotide
tcatccctttaccactt

SEQ ID NO: 1963 - DNA, 18 bp, Artificial sequence
  Synthetic oligonucleotide
ctcatccctttaccactt

SEQ ID NO: 1964 - DNA, 16 bp, Artificial sequence
  Synthetic oligonucleotide
gtctacatctaacccc

SEQ ID NO: 1965 - DNA, 17 bp, Artificial sequence
  Synthetic oligonucleotide
agtctacatctaacccc

SEQ ID NO: 1966 - DNA, 18 bp, Artificial sequence
  Synthetic oligonucleotide
cagtctacatctaacccc

SEQ ID NO: 1967 - DNA, 17 bp, Artificial sequence
  Synthetic oligonucleotide
cagtctacatctaaccc

SEQ ID NO: 1968 - DNA, 18 bp, Artificial sequence
  Synthetic oligonucleotide
tcagtctacatctaaccc

SEQ ID NO: 1969 - DNA, 16 bp, Artificial sequence
  Synthetic oligonucleotide
agtctacatctaaccc

SEQ ID NO: 1970 - DNA, 17 bp, Artificial sequence
  Synthetic oligonucleotide
tcagtctacatctaacc

SEQ ID NO: 1971 - DNA, 18 bp, Artificial sequence
  Synthetic oligonucleotide
ttcagtctacatctaacc

SEQ ID NO: 1972 - DNA, 17 bp, Artificial sequence
  Synthetic oligonucleotide
ttcagtctacatctaac

SEQ ID NO: 1973 - DNA, 17 bp, Artificial sequence
  Synthetic oligonucleotide
tttcagtctacatctaa

SEQ ID NO: 1974 - DNA, 19 bp, Artificial sequence
  Synthetic oligonucleotide
agttttaaccacacctcct

SEQ ID NO: 1975 - DNA, 17 bp, Artificial sequence
  Synthetic oligonucleotide
gttttaaccacacctcc

SEQ ID NO: 1976 - DNA, 18 bp, Artificial sequence
  Synthetic oligonucleotide
agttttaaccacacctcc

SEQ ID NO: 1977 - DNA, 17 bp, Artificial sequence
  Synthetic oligonucleotide
agttttaaccacacctc

SEQ ID NO: 1978 - DNA, 16 bp, Artificial sequence
  Synthetic oligonucleotide
gagttttaaccacacc

SEQ ID NO: 1979 - DNA, 18 bp, Artificial sequence
  Synthetic oligonucleotide
cagatcttctctttattt

SEQ ID NO: 1980 - DNA, 19 bp, Artificial sequence
  Synthetic oligonucleotide
tgttttcaacaaaacatca

SEQ ID NO: 1981 - DNA, 18 bp, Artificial sequence
  Synthetic oligonucleotide
tgttttcaacaaaacatc

SEQ ID NO: 1982 - DNA, 18 bp, Artificial sequence
  Synthetic oligonucleotide
ctgttttcaacaaaacat

SEQ ID NO: 1983 - DNA, 18 bp, Artificial sequence
  Synthetic oligonucleotide
tctgttttcaacaaaaca

SEQ ID NO: 1984 - DNA, 18 bp, Artificial sequence
  Synthetic oligonucleotide
atctttctaaaacttacc

SEQ ID NO: 1985 - DNA, 18 bp, Artificial sequence
  Synthetic oligonucleotide
cagaatctttctaaaact

SEQ ID NO: 1986 - DNA, 17 bp, Artificial sequence
  Synthetic oligonucleotide
ctacagaatctttctaa

SEQ ID NO: 1987 - DNA, 19 bp, Artificial sequence
  Synthetic oligonucleotide
atttccctttatttccctt

SEQ ID NO: 1988 - DNA, 18 bp, Artificial sequence
  Synthetic oligonucleotide
gtatttccctttatttcc

SEQ ID NO: 1989 - DNA, 27 bp, artificial
  FAM labelled probe
agaaacctaactcatcagtggctgcaa

SEQ ID NO: 1990 - DNA, 21 bp, artificial
  Primer
gaacaggatagacacgatggc

SEQ ID NO: 1991 - DNA, 19 bp, artificial
  Primer
agagactatgcgagagcga

SEQ ID NO: 1992 - DNA, 18 bp, Homo sapiens
aagatgtaaataagattc

1. An antisense oligonucleotide selected from the group consisting of Compound ID Nos. 1122_91, 1122_107, 1122_154, 1122_155, 1122_156, 1122_157, 1122_158, 1122_167, 1122_172,1122_175, 1122_294, 1122_296, 1122_359, 1122_384, 1122_385, 1816_13, 1816_15, 1816_28, 1816_41, 1816_42, 1816_43, 1816_60, 1816_61, 1816_64, 1816_65, 1816_68, and 1816_92, or a pharmaceutically acceptable salt thereof.

2. An antisense oligonucleotide according to claim 1 of the following chemical annotation:
a. ^{[LR]}A_{[sP]}.^{[dR]}A_{[sP]}.^{[dR]}T_{[sP]}.^{[LR][5me]}C_{[sP]}.^{[dR]}T_{[sP]}.^{[LR]}T_{[sP]}.^{[dR]}A_{[sP]}.^{[dR]}T_{[sP]}.^{[dR]}T_{[sP]}.^{[mR]}U_{[sP]}.^{[dR]}(A)_{[sP]}.^{[dR]}C_{[sP]}.^{[dR]}A_{[sP]}.^{[dR]}T_{[sP]}.^{[dR]}C_{[sP]}.^{[dR]}T_{[sP]}.^{[LR]}T_{[sP]}.^{[LR][5me]}C)_{[sP]}._{[LR][5me]}C (SEQ ID NO:1122, wherein residue 10 is U) (Compound ID No. 1122_91);
b. ^{[LR]}A_{[sP]}.^{[LR]}A_{[sP]}.^{[mR]}U_{[sP]}.^{[LR][5me]}C_{[sP]}.^{[dR]}T_{[sP]}.^{[dR]}T_{[sP]}.^{[dR]}A_{[sP]}.^{[dR]}T_{[sP]}.^{[dR]}T_{[sP]}.^{[dR]}T_{[sP]}.^{[dR]}A_{[sP]}.^{[dR]}C_{[sP]}.^{[dR]}A_{[sP]}.^{[dR]}T_{[sP]}.^{[dR]}C_{[sP]}.^{[LR]}T_{[sP]}.^{[dR]}T_{[sP]}.^{[LR][5me]}C_{[sP]}.^{[LR][5me]}C (SEQ ID NO:1122, wherein residue 3 is U) (Compound ID No. 1122_107);
c. ^{[LR]}A_{[sP]}.^{[dR]}A_{[sP]}.^{[dR]}T_{[sP]}.^{[LR][5me]}C_{[sP]}.^{[dR]}T_{[sP]}.^{[LR]}T_{[sP]}.^{[dR]}A_{[sP]}.^{[dR]}T_{[sP]}.^{[dR]}T_{[sP]}.^{[dR]}T_{[sP]}.^{[dR]}A_{[sP]}.^{[dR]}C_{[sP]}.^{[dR]}A_{[sP]}.^{[dR]}T_{[sP]}.^{[dR]}C_{[sP]}.^{[dR]}T_{[sP]}.^{[LR]}T_{[sP]}.^{[LR][5me]}C_{[sP]}.^{[LR][5m e]}C (SEQ ID NO:1122) (Compound ID No. 1122_154);
d. ^{[LR]}A_{[sP]}.^{[dR]}A_{[sP]}.^{[dR]}T_{[sP]}.^{[LR][5me]}C_{[sP]}.^{[dR]}T_{[sP]}.^{[LR]}T_{[sP]}.^{[dR]}A_{[sP]}.^{[dR]}T_{[sP]}.^{[dR]}T_{[sP]}.^{[dR]}T_{[sP]}.^{[dR]}A_{[sP]}.^{[dR]}C_{[sP]}.^{[dR]}A_{[sP]}.^{[dR]}T_{[sP]}.^{[dR]}C_{[sP]}.^{[dR]}T_{[sP]}.^{[LR]}T_{[sP]}.^{[LR][5me]}C_{[sP]}.^{[LR][5m e]}C (SEQ ID NO:1122) (Compound ID No. 1122_155);
e. ^{[LR]}A_{[sP]}.^{[dR]}A_{[sP]}.^{[dR]}T_{[sP]}.^{[LR]}[5meC]_{[sP]}.^{[dR]}T_{[sP]}.^{[LR]}T_{[sP]}.^{[dR]}A_{[sP]}.^{[dR]}T_{[sP]}.^{[dR]}T_{[sP]}.^{[d R]}T_{[sP]}.^{[dR]}A_{[sP]}.^{[dR]}C_{[sP]}.^{[dR]}A_{[sP]}.^{[dR]}T_{[sP]}.^{[dR]}C_{[sP]}.^{[dR]}T_{[sP]}.^{[LR]}T_{[sP]}.^{[LR][5me]}C_{[sP]}.^{[LR][5me]}C (SEQ ID NO:1122) (Compound ID No. 1122_156);
f. ^{[LR]}A_{[sP]}.^{[dR]}A_{[sP]}.^{[dR]}T_{[sP]}.^{[LR]}[5meC]_{[sP]}.^{[dR]}T_{[sP]}.^{[LR]}T_{[sP]}.^{[dR]}A_{[sP]}.^{[dR]}T_{[sP]}.^{[dR]}T_{[sP]}.^{[d R]}T_{[sP]}.^{[dR]}A_{[sP]}.^{[dR]}C_{[sP]}.^{[dR]}A_{[sP]}.^{[dR]}T_{[sP]}.^{[dR]}C_{[sP]}.^{[dR]}T_{[sP]}.^{[LR]}T_{[sP]}.^{[LR][5me]}C_{[sP]}.^{[LR][5me]}C (SEQ ID NO:1122) (Compound ID No. 1122_157);
g. ^{[LR]}A_{[sP]}.^{[dR]}A_{[sP]}.^{[dR]}T_{[sP]}.^{[LR][5me]}C_{[sP]}.^{[dR]}T_{[sP]}.^{[LR]}T_{[sP]}.^{[dR]}A_{[sP]}.^{[dR]}T_{[sP]}.^{[dR]}T_{[sP]}.^{[dR]}T_{[sP]}.^{[dR]}A_{[sP]}.^{[dR]}C_{[sP]}.^{[dR]}A_{[sP]}.^{[dR]}T_{[sP]}.^{[dR]}C_{[sP]}.^{[dR]}T_{[sP]}.^{[LR]}T_{[sP]}.^{[LR][5me]}C_{[sP]}.^{[LR][5m e]}C (SEQ ID NO:1122) (Compound ID No. 1122_158);
h. ^{[LR]}A_{[sP]}.^{[dR]}A_{[sP]}.^{[dR]}T_{[sP]}.^{[LR][5me]}C_{[sP]}.^{[dR]}T_{[sP]}.^{[LR]}T_{[sP]}.^{[MOE]}A_{[sP]}.^{[dR]}T_{[sP]}.^{[dR]}T_{[sP]}.^{[dR]}T_{[sP]}.^{[dR]}A_{[sP]}.^{[dR]}C_{[sP]}.^{[dR]}A_{[sP]}.^{[dR]}T_{[sP]}.^{[dR]}C_{[sP]}.^{[dR]}T_{[sP]}.^{[LR]}T_{[sP]}.^{[LR][5me]}C_{[sP]}.^{[LR][5m e]}C (SEQ ID NO:1122) (Compound ID No. 1122_167);
i. ^{[LR]}A_{[sP]}.^{[dR]}A_{[sP]}.^{[dR]}T_{[sP]}.^{[LR][5me]}C_{[sP]}.^{[dR]}T_{[sP]}.^{[LR]}T_{[sP]}.^{[dR]}A_{[sP]}.^{[dR]}T_{[sP]}.^{[dR]}T_{[sP]}.^{[dR]}T_{[sP]}.^{[dR]}A_{[sP]}.^{[dR]}C_{[sP]}.^{[dR]}A_{[sP]}.^{[dR]}T_{[sP]}.^{[mR]}C_{[sP]}.^{[dR]}T_{[sP]}.^{[LR]}T_{[sP]}.^{[LR][5me]}C_{[sP]}.^{[LR][5m e]}C (SEQ ID NO:1122) (Compound ID No. 1122_172);
j. ^{[LR]}A_{[sP]}.^{[dR]}A_{[sP]}.^{[dR]}T_{[sP]}.^{[LR][5me]}C_{[sP]}.^{[dR]}T_{[sP]}.^{[LR]}T_{[sP]}.^{[dR]}A_{[sP]}.^{[dR]}T_{[sP]}.^{[dR]}T_{[sP]}.^{[dR]}T_{[sP]}.^{[mR]}A_{[sP]}.^{[dR]}C_{[sP]}.^{[dR]}A_{[sP]}.^{[dR]}T_{[sP]}.^{[dR]}C_{[sP]}.^{[dR]}T_{[sP]}.^{[LR]}T_{[sP]}.^{[LR][5me]}C_{[sP]}.^{[LR][5m e]}C (SEQ ID NO:1122) (Compound ID No. 1122_175);
k. ^{[LR]}A_{[sP]}.^{[dR]}A_{[sP]}.^{[dR]}T_{[sP]}.^{[LR][5me]}C_{[sP]}.^{[dR]}T_{[sP]}.^{[LR]}T_{[sP]}.^{[dR]}A_{[sP]}.^{[dR]}T_{[sP]}.^{[dR]}T_{[sP]}.^{[dR]}T_{[sP]}.^{[dR]}A_{[sP]}.^{[dR]}C_{[sP]}.^{[dR]}A_{[sP]}.^{[dR]}T_{[sP]}.^{[dR]}C_{[sP]}.^{[dR]}T_{[sP]}.^{[LR]}T_{[sP]}.^{[fR]}C_{[sP]}.^{[LR][5me]}C (SEQ ID NO:1122) (Compound ID No. 1122_294);
l. ^{[LR]}A_{[sP]}.^{[dR]}A_{[sP]}.^{[dR]}T_{[sP]}.^{[mR]}C_{[sP]}.^{[dR]}T_{[sP]}.^{[LR]}T_{[sP]}.^{[dR]}A_{[sP]}.^{[dR]}T_{[sP]}.^{[dR]}T_{[sP]}.^{[dR]}T_{[sP]}.^{[dR]}A_{[sP]}.^{[dR]}C_{[sP]}.^{[dR]}A_{[sP]}.^{[dR]}T_{[sP]}.^{[dR]}C_{[sP]}.^{[dR]}T_{[sP]}.^{[LR]}T_{[sP]}.^{[LR][5me]}C_{[sP]}.^{[LR][5me]}C (SEQ ID NO:1122) (Compound ID No. 1122_296);
m. ^{[LR]}A_{[sP]}.^{[LR]}A_{[sP]}.^{[LR]}T_{[sP]}.^{[LR][5me]}C_{[sP]}.^{[dR]}T_{[sP]}.^{[dR]}T_{[sP]}.^{[dR]}A_{[sP]}.^{[dR]}T_{[sP]}.^{[dR]}T_{[sP]}.^{[dR]}T_{[sP]}.^{[dR]}A_{[sP]}.^{[dR]}C_{[sP]}.^{[dR]}A_{[sP]}.^{[dR]}T_{[sP]}.^{[dR]}C_{[MOPS]}.^{[LR]}T_{[sP]}.^{[dR]}T_{[sP]}.^{[LR][5me]}C_{[sP]}.^{[LR][5me]}C (SEQ ID NO:1122) (Compound ID No. 1122_359);
n. ^{[LR]}A_{[sP]}.^{[LR]}A_{[sP]}.^{[LR]}T_{[sP]}.^{[LR][5me]}C_{[sP]}.^{[dR]}T_{[sP]}.^{[dR]}T_{[sP]}.^{[dR]}A_{[sP]}.^{[dR]}T_{[sP]}.^{[dR]}T_{[sP]}.^{[dR]}T_{[sP]}.^{[dR]}A_{[sP]}.^{[dR]}C_{[sP]}.^{[dR]}A_{[sP]}.^{[dR]}T_{[sP]}.^{[dR]}C_{[sP]}.^{[LR]}T_{[MOPS]}.^{[dR]}T_{[sP]}.^{[LR][5me]}C_{[sP]}.^{[LR][5me]}C (SEQ ID NO:1122) (Compound ID No. 1122_384);
o. ^{[LR]}A_{[sP]}.^{[dR]}A_{[sP]}.^{[dR]}T_{[sP]}.^{[LR][5me]}C_{[sP]}.^{[dR]}T_{[sP]}.^{[LR]}T_{[MOPS]}.^{[dR]}A_{[sP]}.^{[dR]}T_{[sP]}.^{[dR]}T_{[sP]}.^{[dR]}T_{[sP]}.^{[dR]}A_{[sP]}.^{[dR]}C_{[sP]}.^{[dR]}A_{[sP]}.^{[dR]}T_{[sP]}.^{[dR]}C_{[sP]}.^{[dR]}T_{[sP]}.^{[LR]}T_{[sP]}.^{[LR][5me]}C_{[sP]}.^{[LR][5me]}C (SEQ ID NO:1122) (Compound ID No. 1122_385);
p. ^{[LR]}G_{[sP]}.^{[LR]}A_{[sP]}.^{[dR]}A_{[sP]}.^{[dR]}T_{[sP]}.^{[LR][5me]}C_{[sP]}.^{[dR]}T_{[sP]}.^{[LR]}T_{[sP]}.^{[LR]}A_{[sP]}.^{[dR]}T_{[sP]}.^{[dR]}T_{[sP]}.^{[dR]}T_{[sP]}.^{[dR]}A_{[sP]}.^{[dR]}C_{[sP]}.^{[dR]}A_{[sP]}.^{[dR]}T_{[sP]}.^{[LR][5me]}C_{[sP]}.^{[LR]}T_{[sP]}.^{[LR]}T (SEQ ID NO:1816) (Compound ID No. 1816_13);
q. ^{[LR]}G_{[sP]}.^{[LR]}A_{[sP]}.^{[dR]}A_{[sP]}.^{[dR]}T_{[sP]}.^{[LR][5me]}C_{[sP]}.^{[dR]}T_{[sP]}.^{[LR]}T_{[sP]}.^{[LR]}A_{[sP]}.^{[dR]}T_{[sP]}.^{[dR]}T_{[sP]}.^{[dR]}T_{[sP]}.^{[dR]}A_{[sP]}.^{[dR]}C_{[sP]}.^{[dR]}A_{[sP]}.^{[dR]}T_{[sP]}.^{[LR][5me]}C_{[sP]}.^{[LR]}T_{[sP]}.^{[LR]}T (SEQ ID NO:1816) (Compound ID No. 1816_15);
r. ^{[LR]}G_{[sP]}.^{[LR]}A_{[sP]}.^{[dR]}A_{[sP]}.^{[dR]}T_{[sP]}.^{[LR][5me]}C_{[sP]}.^{[dR]}T_{[sP]}.^{[LR]}T_{[sP]}[fR]A_{[sP]}.^{[dR]}T_{[sP]}.^{[dR]}T_{[sP]}.^{[dR]}T_{[sP]}.^{[dR]}A_{[sP]}.^{[dR]}C_{[sP]}.^{[dR]}A_{[sP]}.^{[dR]}T_{[sP]}.^{[LR][5me]}C_{[sP]}.^{[LR]}T_{[sP]}.^{[LR]}T (SEQ ID NO:1816) (Compound ID No. 1816_28);
s. ^{[LR]}G_{[sP]}.^{[LR]}A_{[sP]}.^{[LR]}A_{[sP]}.^{[dR]}T_{[sP]}.^{[LR][5me]}C_{[sP]}.^{[dR]}T_{[sP]}.^{[LR]}T_{[sP]}.^{[LR]}A_{[sP]}.^{[dR]}T_{[sP]}.^{[dR]}T_{[sP]}.^{[dR]}T_{[sP]}.^{[dR]}A_{[sP]}.^{[dR]}C_{[sP]}.^{[dR]}A_{[sP]}.^{[dR]}T_{[sP]}.^{[LR][5me]}C_{[sP]}.^{[LR]}T_{[sP]}.^{[LR]}T (SEQ ID NO:1816) (Compound ID No. 1816_41);
t. ^{[LR]}G_{[sP]}.^{[LR]}A_{[sP]}.^{[dR]}A_{[sP]}.^{[dR]}T_{[sP]}.^{[LR][5me]}C_{[sP]}.^{[dR]}T_{[sP]}.^{[LR]}T_{[sP]}.^{[LR]}A_{[sP]}.^{[dR]}T_{[sP]}.^{[dR]}T_{[sP]}.^{[dR]}T_{[sP]}.^{[dR]}A_{[sP]}.^{[dR]}C_{[sP]}.^{[dR]}A_{[sP]}.^{[dR]}T_{[sP]}.^{[LR][5me]}C_{[sP]}.^{[MOE]}T_{[sP]}.^{[LR]}T (SEQ ID NO:1816) (Compound ID No. 1816_42);
u. ^{[LR]}G_{[sP]}.^{[LR]}A_{[sP]}.^{[dR]}A_{[sP]}.^{[dR]}T_{[sP]}.^{[LR][5me]}C_{[sP]}.^{[dR]}T_{[sP]}.^{[LR]}T_{[sP]}.^{[LR]}A_{[sP]}.^{[dR]}T_{[sP]}.^{[dR]}T_{[sP]}.^{[dR]}T_{[sP]}.^{[dR]}A_{[sP]}.^{[dR]}C_{[sP]}.^{[dR]}A_{[sP]}.^{[dR]}T_{[sP]}.^{[MOE][5me]}C_{[sP]}.^{[LR]}T_{[sP]}.^{[LR]}T (SEQ ID NO:1816) (Compound ID No. 1816_43);
v. ^{[LR]}G_{[sP]}.^{[LR]}A_{[sP]}.^{[dR]}A_{[sP]}.^{[dR]}T_{[sP]}.^{[LR][5me]}C_{[sP]}.^{[dR]}T_{[sP]}.^{[LR]}T_{[sP]}.^{[mR]}A_{[sP]}.^{[dR]}T_{[sP]}.^{[dR]}T_{[sP]}.^{[dR]}T_{[sP]}.^{[dR]}A_{[sP]}.^{[dR]}C_{[sP]}.^{[dR]}A_{[sP]}.^{[dR]}T_{[sP]}.^{[LR][5me]}C_{[sP]}.^{[LR]}T_{[sP]}.^{[LR]}T (SEQ ID NO:1816) (Compound ID No. 1816_60);
w. ^{[LR]}G_{[sP]}.^{[LR]}A_{[sP]}.^{[mR]}A_{[sP]}.^{[dR]}T_{[sP]}.^{[LR][5me]}C_{[sP]}.^{[dR]}T_{[sP]}.^{[LR]}T_{[sP]}.^{[LR]}A_{[sP]}.^{[dR]}T_{[sP]}.^{[dR]}T_{[sP]}.^{[dR]}T_{[sP]}.^{[dR]}A_{[sP]}.^{[dR]}C_{[sP]}.^{[dR]}A_{[sP]}.^{[dR]}T_{[sP]}.^{[LR][5me]}C_{[sP]}.^{[LR]}T_{[sP]}.^{[LR]}T (SEQ ID NO:1816) (Compound ID No. 1816_61);
x. ^{[LR]}G_{[sP]}.^{[LR]}A_{[sP]}.^{[dR]}A_{[sP]}.^{[dR]}T_{[sP]}.^{[LR][5me]}C_{[sP]}.^{[dR]}T_{[sP]}.^{[LR]}T_{[sP]}.^{[LR]}A_{[sP]}.^{[dR]}T_{[sP]}.^{[dR]}T_{[sP]}.^{[dR]}T_{[sP]}.^{[dR]}A_{[sP]}.^{[dR]}C_{[sP]}.^{[dR]}A_{[sP]}.^{[dR]}T_{[sP]}.^{[fR]}C_{[sP]}.^{[LR]}T_{[sP]}.^{[LR]}T (SEQ ID NO:1816) (Compound ID No. 1816_64);
y. ^{[LR]}G_{[sP]}.^{[LR]}A_{[sP]}.^{[dR]}A_{[sP]}.^{[dR]}T_{[sP]}.^{[LR][5me]}C_{[sP]}.^{[dR]}T_{[sP]}.^{[LR]}T_{[sP]}.^{[LR]}A_{[sP]}.^{[dR]}T_{[sP]}.^{[dR]}T_{[sP]}.^{[dR]}T_{[sP]}.^{[dR]}A_{[sP]}.^{[dR]}C_{[sP]}.^{[dR]}A_{[sP]}.^{[dR]}T_{[sP]}.^{[mR]}C_{[sP]}.^{[LR]}T_{[sP]}.^{[LR]}T (SEQ ID NO:1816) (Compound ID No. 1816_65);
z. ^{[LR]}G_{[sP]}.^{[LR]}A_{[sP]}.^{[dR]}A_{[sP]}.^{[dR]}T_{[sP]}.^{[LR][5me]}C_{[sP]}.^{[dR]}T_{[sP]}.^{[LR]}T_{[sP]}.^{[LR]}A_{[sP]}.^{[dR]}T_{[sP]}.^{[dR]}T_{[sP]}.^{[dR]}T_{[sP]}.^{[dR]}A_{[sP]}.^{[dR]}C_{[sP]}.^{[dR]}A_{[sP]}.^{[dR]}T_{[sP]}.^{[LR][5me]}C_{[sP]}.^{[fR]}U_{[sP]}.^{[LR]}T (SEQ ID NO:1816, wherein residue 17 is U) (Compound ID No. 1816_68); or
aa. ^{[LR]}G_{[sP]}.^{[LR]}A_{[sP]}.^{[dR]}A_{[sP]}.^{[dR]}T_{[sP]}.^{[LR][5me]}C_{[sP]}.^{[dR]}T_{[sP]}.^{[LR]}T_{[sP]}.^{[LR]}A_{[sP]}.^{[dR]}T_{[sP]}.^{[dR]}T_{[sP]}.^{[dR]}T_{[sP]}.^{[dR]}A_{[sP]}.^{[dR]}C_{[sP]}.^{[dR]}A_{[sP]}.^{[dR]}T_{[sP]}.^{[LR][5me]}C_{[MOPS]}.^{[LR]}T_{[sP]}.^{[LR]}T (SEQ ID NO:1816) (Compound ID No. 1816_92);
or a pharmaceutically acceptable salt thereof, wherein
[LR] is a beta-D-oxy-LNA nucleoside,
[LR][5me]C is a beta-D-oxy-LNA 5-methyl cytosine nucleoside,
[dR] is a DNA nucleoside,
[sP] is a phosphorothioate internucleoside linkage (stereo undefined)
[ssP] is a stereodefined Sp phosphorothioate internucleoside linkage
[MOPS] is a 3-methoxypropylphosphonothioate internucleoside linkage
[MOPO] is a 3-methoxypropylphosphonate internucleoside linkage
[mR] is a 2′-O-methyl nucleoside,
[MOE] is a 2′-O-methoxyethyl nucleoside, and
[fR] is a 2′-fluoro nucleoside.

3. The antisense oligonucleotide according to claim 1, which is the antisense oligonucleotide shown in FIG. 12A (Compound ID No. 1122_91); or a pharmaceutically acceptable salt thereof.

4. The antisense oligonucleotide according to claim 1, which is the antisense oligonucleotide shown in FIG. 12B (Compound ID No. 1122_107); or a pharmaceutically acceptable salt thereof.

5. The antisense oligonucleotide according to claim 1, which is the antisense oligonucleotide shown in FIG. 12C (Compound ID No. 1122_154); or a pharmaceutically acceptable salt thereof.

6. The antisense oligonucleotide according to claim 1, which is the antisense oligonucleotide shown in FIG. 12D (Compound ID No. 1122_155); or a pharmaceutically acceptable salt thereof.

7. The antisense oligonucleotide according to claim 1, which is the antisense oligonucleotide shown in FIG. 12E (Compound ID No. 1122_156); or a pharmaceutically acceptable salt thereof.

8. The antisense oligonucleotide according to claim 1, which is the antisense oligonucleotide shown in FIG. 12F (Compound ID No. 1122_157); or a pharmaceutically acceptable salt thereof.

9. The antisense oligonucleotide according to claim 1, which is the antisense oligonucleotide shown in FIG. 12G (Compound ID No. 1122_158); or a pharmaceutically acceptable salt thereof.

10. The antisense oligonucleotide according to claim 1, which is the antisense oligonucleotide shown in FIG. 12H (Compound ID No. 1122_167); or a pharmaceutically acceptable salt thereof.

11. The antisense oligonucleotide according to claim 1, which is the antisense oligonucleotide shown in FIG. 12I (Compound ID No. 1122_172); or a pharmaceutically acceptable salt thereof.

12. The antisense oligonucleotide according to claim 1, which is the antisense oligonucleotide shown in FIG. 12J (Compound ID No. 1122_175); or a pharmaceutically acceptable salt thereof.

13. The antisense oligonucleotide according to claim 1, which is the antisense oligonucleotide shown in FIG. 12K (Compound ID No. 1122_294); or a pharmaceutically acceptable salt thereof.

14. The antisense oligonucleotide according to claim 1, which is the antisense oligonucleotide shown in FIG. 12L (Compound ID No. 1122_296); or a pharmaceutically acceptable salt thereof.

15. The antisense oligonucleotide according to claim 1, which is the antisense oligonucleotide shown in FIG. 12M (Compound ID No. 1122_359); or a pharmaceutically acceptable salt thereof.

16. The antisense oligonucleotide according to claim 1, which is the antisense oligonucleotide shown in FIG. 12N (Compound ID No. 1122_384); or a pharmaceutically acceptable salt thereof.

17. The antisense oligonucleotide according to claim 1, which is the antisense oligonucleotide shown in FIG. 12O (Compound ID No. 1122_385); or a pharmaceutically acceptable salt thereof.

18. The antisense oligonucleotide according to claim 1, which is the antisense oligonucleotide shown in FIG. 12P (Compound ID No. 1816_13); or a pharmaceutically acceptable salt thereof.

19. The antisense oligonucleotide according to claim 1, which is the antisense oligonucleotide shown in FIG. 12Q (Compound ID No. 1816_15); or a pharmaceutically acceptable salt thereof.

20. The antisense oligonucleotide according to claim 1, which is the antisense oligonucleotide shown in FIG. 12R (Compound ID No. 1816_28); or a pharmaceutically acceptable salt thereof.

21. The antisense oligonucleotide according to claim 1, which is the antisense oligonucleotide shown in FIG. 12S (Compound ID No. 1816_41); or a pharmaceutically acceptable salt thereof.

22. The antisense oligonucleotide according to claim 1, which is the antisense oligonucleotide shown in FIG. 12T (Compound ID No. 1816_42); or a pharmaceutically acceptable salt thereof.

23. The antisense oligonucleotide according to claim 1, which is the antisense oligonucleotide shown in FIG. 12U (Compound ID No. 1816_43); or a pharmaceutically acceptable salt thereof.

24. The antisense oligonucleotide according to claim 1, which is the antisense oligonucleotide shown in FIG. 12V (Compound ID No. 1816_60); or a pharmaceutically acceptable salt thereof.

25. The antisense oligonucleotide according to claim 1, which is the antisense oligonucleotide shown in FIG. 12W (Compound ID No. 1816_61); or a pharmaceutically acceptable salt thereof.

26. The antisense oligonucleotide according to claim 1, which is the antisense oligonucleotide shown in FIG. 12X (Compound ID No. 1816_64); or a pharmaceutically acceptable salt thereof.

27. The antisense oligonucleotide according to claim 1, which is the antisense oligonucleotide shown in FIG. 12Y (Compound ID No. 1816_65); or a pharmaceutically acceptable salt thereof.

28. The antisense oligonucleotide according to claim 1, which is the antisense oligonucleotide shown in FIG. 12Z (Compound ID No. 1816_68); or a pharmaceutically acceptable salt thereof.

29. The antisense oligonucleotide according to claim 1, which is the antisense oligonucleotide shown in FIG. 12AA (Compound ID No. 1816_92); or a pharmaceutically acceptable salt thereof.

30. A conjugate comprising an oligonucleotide according to claim 1, and at least one conjugate moiety covalently attached to said oligonucleotide; or a pharmaceutically acceptable salt thereof.

31. A pharmaceutical composition comprising an oligonucleotide according to claim 1 or a conjugate thereof and a pharmaceutically acceptable diluent, solvent, carrier, salt and/or adjuvant.

32. An in vivo or in vitro method for modulating ATXN3 expression in a target cell which is expressing ATXN3, said method comprising administering an oligonucleotide selected from a group consisting of Compound ID Nos. 1122_91, 1122_107, 1122_154, 1122_155, 1122_156, 1122_157, 1122_158, 1122_167, 1122_172, 1122_175, 1122_294, 1122_296, 1122_359, 1122_384, 1122_385, 1816_13, 1816_15, 1816_28, 1816_41, 1816_42, 1816_43, 1816_60, 1816_61, 1816_64, 1816_65, 1816_68, and 1816_92, a conjugate, a salt, or a pharmaceutical composition thereof in an effective amount to said cell.

33. A method for treating or preventing a disease comprising administering a therapeutically or prophylactically effective amount of an oligonucleotide selected from a group consisting of Compound ID Nos. 1122_91, 1122_107, 1122_154, 1122_155, 1122_156, 1122_157, 1122_158, 1122_167, 1122_172, 1122_175, 1122_294, 1122_296, 1122_359, 1122_384, 1122_385, 1816_13, 1816_15, 1816_28, 1816_41, 1816_42, 1816_43, 1816_60, 1816_61, 1816_64, 1816_65 1816_68, and 1816_92, a conjugate, a salt, or a pharmaceutical composition thereof to a subject suffering from or susceptible to the disease.

34. The method of claim 33, wherein the disease is spinocerebellar ataxia, such as spinocerebellar ataxia 3, such as Machado-Joseph disease

35. The oligonucleotide, a conjugate, a salt, or a pharmaceutical composition thereof according to claim 1 for use in medicine.

36. The oligonucleotide, a conjugate, a salt, or a pharmaceutical composition thereof according to claim 1 for use in the treatment or prevention of spinocerebellar ataxia, such as spinocerebellar ataxia 3, such as Machado-Joseph disease, (MJD).

37. Use of the oligonucleotide, a conjugate, a salt, or a pharmaceutical composition thereof according to claim 1 for the preparation of a medicament for treatment or prevention of spinocerebellar ataxia, such as spinocerebellar ataxia 3, such as Machado-Joseph disease.
